(19) United States
(12) Patent Application Publication
(10) Pub. No.: US 2011/0113508 A1
(43) Pub. Date: May 12, 2011

(54) MODULATING PLANT CAROTENOID LEVELS

(75) Inventors: Steven Craig Bobzin, Malibu, CA (US); Joon-Hyun Park, Oak Park, CA (US); Boris Jankowski, Newbury Park, CA (US); Karen Chiang, Houston, TX (US); Amr Saad Ragab, New Haven, CT (US)

(73) Assignee: CERES, INC., Thousand Oaks, CA (US)

(21) Appl. No.: 12/377,778

(22) PCT Filed: Aug. 20, 2007
(86) PCT No.: PCT/US07/18519

§ 371 Date: Dec. 8, 2010

Related U.S. Application Data
(60) Provisional application No. 60/838,646, filed on Aug. 18, 2006.

(51) Int. Cl. C12N 15/82; C12N 15/29

(52) U.S. Cl. 800/278; 536/23.6

(57) ABSTRACT

Methods and materials for modulating (e.g., increasing or decreasing) carotenoid levels in plants are disclosed. For example, nucleic acids encoding carotenoid-modulating polypeptides are disclosed as well as methods for using such nucleic acids to transform plant cells. Also disclosed are plants having increased carotenoid levels and plant products produced from plants having increased carotenoid levels.

### CROSS-REFERENCE TO RELATED APPLICATIONS

[0001] This application claims priority to U.S. Provisional Application No. 60/838,646, filed Aug. 18, 2006, the contents of which are hereby incorporated by reference in their entirety.

### TECHNICAL FIELD

[0002] This invention relates to methods and materials involved in modulating (e.g., increasing or decreasing) carotenoid levels in plants. For example, this document provides plants having increased carotenoid levels as well as materials and methods for making plants and plant products having increased carotenoid levels.

### INCORPORATION-BY-REFERENCE & TEXT

[0003] The material on the accompanying file contained in the attached compact disc hereby incorporated by reference into this application. The accompanying compact discs being submitted in quadruplicate contain one identical file, 179WO1-sequence.txt, which was created on Aug. 20, 2007. The file named 179WO1-sequence.txt is 714 KB. The file can be accessed using Microsoft Word on a computer that uses Windows OS.

### BACKGROUND

[0004] Carotenoids are a widely distributed group of naturally occurring pigments, usually red, orange or yellow in color. Carotenoids are an important class of metabolites distinguished by a broad range of structural diversity, physiological function, and biological activity. Carotenoids play critical roles in many normal cellular and developmental processes in both plants and animals. Carotenoids also have significant pharmaceutical and neutraceutical applications. In both natural and synthetic forms, carotenoids have been shown to have antioxidant, anticarcinogenic, anti-inflammatory, immunomodulatory, and cardioprotective effects. Carotenoids and degradation products of carotenoids also contribute both to the flavoring and aroma of foods, as well as to the aroma of flowers.

[0005] In humans, dietary carotenoids such as α- and β-carotene are a major source of vitamin A precursors. Deficiency of vitamin A is a major cause of blindness and premature death in developing nations, particularly among children. Other carotenoids, for example, lycopene, lutein and zeaxanthin play an important role in human health by acting as biological antioxidants. The antioxidant effects of carotenoids are believed to protect against degenerative eye disease and certain types of cancers.

[0006] Plants can serve as natural sources of carotenoid molecules. In light of the wide variety of useful applications of these molecules, it is desirable to produce plants having modulated levels of carotenoids. One strategy to modulate plant carotenoid levels relies upon traditional plant breeding methods. Another approach involves genetic manipulation of plant characteristics through the introduction of exogenous nucleic acids conferring a desirable trait.

### SUMMARY

[0007] Carotenoids are a diverse class of metabolites derived from isoprenoid units. Carotenoids are generally divided into two classes: the carotenes, which are unoxidized, and the xanthophylls, in which some of the double bonds have been oxidized. Useful carotenoids include molecules from both classes, for example, α-, β-, and ζ-carotenes and xanthophylls, e.g. lutein and zeaxanthin.

[0008] The invention features methods and materials related to modulating (e.g., increasing or decreasing) carotenoid levels in plants. The methods can include transforming a plant cell with a nucleic acid encoding a carotenoid-modulating polypeptide, wherein expression of the polypeptide results in a modulated level of one or more carotenoids. Plant cells produced using such methods can be grown to produce plants having an increased or decreased carotenoid content. Such plants may be used to produce, for example, foodstuffs and animal feed having an increased nutritional content, and/or modified appearance or color, which may benefit both food producers and consumers, or can be used as sources from which to extract one or more carotenoids.

[0009] Thus, in one aspect, the invention features a method of modulating the level of a carotenoid in a plant. The method can comprise introducing an exogenous nucleic acid into a plant cell. The exogenous nucleic acid comprises a regulatory region operably linked to a nucleotide sequence encoding a polypeptide, in which the HMM bit score of the amino acid sequence of the polypeptide is greater than 50, the HMM based on the amino acid sequences depicted in one of FIGS. 1-9. A tissue of a plant produced from the plant cell has a difference in the level of a carotenoid as compared to the corresponding level in tissue of a control plant that does not comprise the exogenous nucleic acid.

[0010] In some embodiments, the method comprises introducing into a plant cell an exogenous nucleic acid comprising a regulatory region operably linked to a nucleotide sequence encoding a polypeptide having 80 percent or greater sequence identity to an amino acid sequence selected from the group consisting of SEQ ID NOs: 80-87, SEQ ID NO: 89, SEQ ID NOs: 91-93, SEQ ID NO: 95, SEQ ID NO: 96, SEQ ID NO: 98; SEQ ID NO: 99, SEQ ID NO: 100, SEQ ID NO:101, SEQ ID NO:102, SEQ ID NO: 104, SEQ ID NO:106, SEQ ID NO:108, SEQ ID NO: 110, SEQ ID NO: 128, SEQ ID NO: 129, SEQ ID NO: 131; SEQ ID NO: 133, SEQ ID NO:135, SEQ ID NO:137, SEQ ID NO:139, SEQ ID NO:141, SEQ ID NO:143, SEQ ID NO:144, SEQ ID NO:146, SEQ ID NO:148, SEQ ID NO:150, SEQ ID NO:152, SEQ ID NO:154, SEQ ID NO:156, SEQ ID NO:157; SEQ ID NO: 159, SEQ ID NO: 161, SEQ ID NO: 163, SEQ ID NO: 165, SEQ ID NO: 167, SEQ ID NO: 169, SEQ ID NO: 170, SEQ ID NO: 172, SEQ ID NO: 174, SEQ ID NO: 176, SEQ ID NO: 178, SEQ ID NO: SEQ ID NO: 180, SEQ ID NO: 182, SEQ ID NO: 183, SEQ ID NO: 185, SEQ ID NO: 187, SEQ ID NO: 189, SEQ ID NO: 191, SEQ ID NO: 193, SEQ ID NO: 195, SEQ ID NO: 196, SEQ ID NO: 198, SEQ ID NOs: 199-203, SEQ ID NO: 205, SEQ ID NO: 206, SEQ ID NO: 208, SEQ ID NO: 210, SEQ ID NO: 212, SEQ ID NO: 213, SEQ ID NO: 215, SEQ ID NO: 216, SEQ ID NO: 218, SEQ ID NO: 220, SEQ ID NO: 222, SEQ ID NO: 223, SEQ ID NO: 224, SEQ ID NO:226, SEQ ID NO:228, SEQ ID NO:229, SEQ ID NO:231, SEQ ID NO:232, SEQ ID NO:234, SEQ ID NO:236, SEQ ID NO:238, SEQ ID NO:240, SEQ ID NO:242, SEQ ID NO:244, SEQ ID NO:246, SEQ ID NOs:248-257, SEQ ID NO:259, SEQ ID NO:261, SEQ ID NO:262, SEQ ID NO:264, SEQ ID NO:265, SEQ ID NO:267, SEQ ID NO:269, SEQ ID NO:271, SEQ ID NO:273, SEQ ID NO:275, SEQ ID NO:277, SEQ ID NO:279, SEQ ID NOs:281-290, SEQ ID NO:292, SEQ ID NO:294, SEQ ID NO:296, SEQ ID NO:298, SEQ ID NO:300, SEQ ID NO:302, SEQ ID NOs:304-313, SEQ ID NO:315, SEQ ID NO:316, SEQ ID NO:318, SEQ ID NO:320, SEQ ID NO:322, SEQ ID NO:324, SEQ ID NO:326, SEQ ID NOs:328-339, SEQ ID NO:341, SEQ ID NO:343, SEQ ID NO:345, SEQ ID NO:347, SEQ ID NO:349, SEQ ID NO:351, SEQ ID NO:353, SEQ ID NO:354, SEQ ID NOs:356-361, SEQ ID NO:363, SEQ ID NO:365, and SEQ ID NOs:367-371. A tissue of a plant produced from the plant cell has a difference in the level of a carotenoid as compared to the corresponding level in tissue of a control plant that does not comprise the exogenous nucleic acid.

[0011] In another aspect, the invention features a method of producing a plant tissue. The method can comprise growing a plant cell comprising an exogenous nucleic acid, the exogenous nucleic acid comprising a regulatory region operably linked to a nucleotide sequence encoding a polypeptide, in which the HMM bit score of the amino acid sequence of the polypeptide is greater than 50, the HMM based on the amino acid sequences depicted in one of FIGS. 1-9, A tissue of a plant produced from the plant cell has a difference in the level of a carotenoid as compared to the corresponding level in tissue of a control plant that does not comprise the exogenous nucleic acid.

[0012] The nucleotide sequence in such methods can encode a polypeptide in which the HMM bit score of the amino acid sequence of the polypeptide is greater than 50, the HMM based on the amino acid sequences depicted in FIG. 7. The nucleotide sequence can encode a polypeptide comprising an amino acid sequence corresponding to SEQ ID NO: 110.

[0013] In another aspect, the invention features a method of modulating the level of a carotenoid in a plant. The method can comprise introducing into a plant cell an exogenous nucleic acid comprising a regulatory region operably linked to a nucleotide sequence having 80 percent or greater sequence identity to a nucleotide sequence selected from the group consisting of SEQ ID NO: 94, SEQ ID NO: 103, SEQ ID NO: 107, SEQ ID NO: 109, SEQ ID NO: 127, SEQ ID NO: 130, SEQ ID NO: 132, SEQ ID NO: 134, SEQ ID NO: 136, SEQ ID NO: 138, SEQ ID NO: 140, SEQ ID NO: 142, SEQ ID NO.: 145, SEQ ID NO: 147, SEQ ID NO: 149, SEQ ID NO: 151, SEQ ID NO: 153, SEQ ID NO: 155, SEQ ID NO: 158, SEQ ID NO: 160, SEQ ID NO: 162, SEQ ID NO: 164, SEQ ID NO: 166, SEQ ID NO: 168, SEQ ID NO: 171, SEQ ID NO: 173, SEQ ID NO: 175, SEQ ID NO: 177, SEQ ID NO: 179, SEQ ID NO: 181, SEQ ID NO: 184, SEQ ID NO: 186, SEQ ID NO: 188, SEQ ID NO: 190, SEQ ID NO: 192, SEQ ID NO: 194, SEQ ID NO: 197, SEQ ID NO: 204, SEQ ID NO: 207, SEQ ID NO: 209, SEQ ID NO: 211, SEQ ID NO: 214, SEQ ID NO: 217, SEQ ID NO: 219, SEQ ID NO: 221, SEQ ID NO: 225, SEQ ID NO: 227, SEQ ID NO: 230, SEQ ID NO: 233, SEQ ID NO: 235, SEQ ID NO: 237, SEQ ID NO: 239, SEQ ID NO: 241, SEQ ID NO: 243, SEQ ID NO: 245; SEQ ID NO: 247, SEQ ID NO: 258, SEQ ID NO: 260, SEQ ID NO: 263, SEQ ID NO: 266, SEQ ID NO: 268, SEQ ID NO: 270, SEQ ID NO: 272, SEQ ID NO: 274, SEQ ID NO: 276, SEQ ID NO: 278, SEQ ID NO: 280, SEQ ID NO: 291, SEQ ID NO: 293, SEQ ID NO: 295, SEQ ID NO: 297, SEQ ID NO: 299, SEQ ID NO: 301, SEQ ID NO: 303, SEQ ID NO: 314, SEQ ID NO: 317, SEQ ID NO: 319, SEQ ID NO: 321, SEQ ID NO: 323, SEQ ID NO: 325, SEQ ID NO: 327, SEQ ID NO: 340, SEQ ID NO: 342, SEQ ID NO: 344, SEQ ID NO: 346, SEQ ID NO: 348, SEQ ID NO: 350, SEQ ID NO: 352, SEQ ID NO: 355, SEQ ID NO: 362, SEQ ID NO: 364, SEQ ID NO: 366, SEQ ID NO: 372, SEQ ID NO: 374, SEQ ID NO: 375, SEQ ID NO: 376, SEQ ID NO: 377, SEQ ID NO: 378, SEQ ID NO: 379. In another aspect, the invention features a method of producing a plant tissue. The method can comprise growing a plant cell comprising an exogenous nucleic acid, the exogenous nucleic acid comprising a regulatory region operably linked to a nucleotide sequence having 80 percent or greater sequence identity to a nucleotide sequence selected from the aforementioned group of sequences. In both such methods, a tissue of a plant produced from the plant cell has a difference in the level of a carotenoid as compared to the corresponding level in tissue of a control plant that does not comprise the nucleic acid. The nucleotide sequence can encode a polypeptide, the HMM bit score of the amino acid sequence of the polypeptide being greater than 50, the HMM based on the amino acid sequences depicted in FIG. 7. The nucleotide sequence can encode a polypeptide comprising the amino acid sequence set forth in SEQ ID NO: 110. The nucleotide sequence can have a sequence identity that is 85 percent or greater to one of the aforementioned group of sequences.

[0014] The nucleotide sequence in any of the above methods can encode a polypeptide comprising an amino acid sequence selected from the group consisting of SEQ ID NO: 80, SEQ ID NO: 89, SEQ ID NO: 91, SEQ ID NO: 95, SEQ ID NO: 98, SEQ ID NO: 104, SEQ ID NO: 144 and SEQ ID NO: 240.

[0015] The carotenoid in any of the above methods can be phytoene, ζ-carotene, lycopene, δ-carotene, α-carotene, lutein, gamma-carotene, cis-β-carotene, trans-β-carotene, zeaxanthin, antheraxanthin, astaxanthin, bixin, capsanthin, fucoxanthin, or violaxanthin. The difference in the level of a carotenoid in any of the above methods can be an increase in the level of a carotenoid, e.g., ζ-carotene, lutein, cis-β-carotene, trans-β-carotene, neoxanthin, or violaxanthin. The regulatory region in any of the above methods can be a promoter, e.g., a tissue-preferential, broadly expressing, or inducible promoter.

[0016] The plant cell in any of the above methods can be from a member of a dicot genus, for example, Lycopersicon, Lactuca, Glycine, Gossypium, or Brassica. Alternatively, the plant cell can be from a member of a monocot genus, for example, Triticum, Zea, Oryza, or Musa.

[0017] The tissue in any of the above methods can be a fruit, vegetative, tuber, or seed tissue.

[0018] In another aspect, the invention features a plant cell comprising an exogenous nucleic acid. The exogenous nucleic acid comprises a regulatory region operably linked to a nucleotide sequence encoding a polypeptide, in which the HMM bit score of the amino acid sequence of the polypeptide is greater than 50, the HMM based on the amino acid sequences depicted in one of FIGS. 1-9. A tissue of a plant produced from the plant cell has a difference in the level of a carotenoid as compared to the corresponding level in tissue of a control plant that does not comprise the exogenous nucleic acid.

[0019] In another aspect, the invention features a plant cell comprising an exogenous nucleic acid, the exogenous nucleic acid comprising a regulatory region operably linked to a nucleotide sequence having 80 percent or greater sequence identity to a nucleotide sequence selected from the group consisting of SEQ ID NO: 94, SEQ ID NO: 103, SEQ ID NO: 107, SEQ ID NO: 109, SEQ ID NO: 127, SEQ ID NO: 130, SEQ ID NO: 132, SEQ ID NO: 134, SEQ ID NO: 136, SEQ ID NO: 138, SEQ ID NO: 140, SEQ ID NO: 142, SEQ ID NO: 145, SEQ ID NO: 147, SEQ ID NO: 149, SEQ ID NO: 151, SEQ ID NO: 153, SEQ ID NO: 155, SEQ ID NO: 158, SEQ ID NO: 160, SEQ ID NO: 162, SEQ ID NO: 164, SEQ ID NO: 166, SEQ ID NO: 168, SEQ ID NO: 171, SEQ ID NO: 173, SEQ ID NO: 175, SEQ ID NO: 177, SEQ ID NO: 179, SEQ ID NO: 181, SEQ ID NO: 184, SEQ ID NO: 186, SEQ ID NO: 188, SEQ ID NO: 190, SEQ ID NO: 192, SEQ ID NO: 194, SEQ ID NO: 197, SEQ ID NO: 204, SEQ ID NO: 207, SEQ ID NO: 209, SEQ ID NO: 211, SEQ ID NO: 214, SEQ ID NO: 217, SEQ ID NO: 219, SEQ ID NO: 221, SEQ ID NO: 225, SEQ ID NO: 227, SEQ ID NO: 230, SEQ ID NO: 233, SEQ ID NO: 235, SEQ ID NO: 237, SEQ ID NO: 239, SEQ ID NO: 241, SEQ ID NO: 243, SEQ ID NO: 245, SEQ ID NO: 247, SEQ ID NO: 258, SEQ ID NO: 260, SEQ ID NO: 263, SEQ ID NO: 266, SEQ ID NO: 268; SEQ ID NO: 270, SEQ ID NO: 272, SEQ ID NO: 274, SEQ ID NO: 276, SEQ ID NO: 278, SEQ ID NO: 280, SEQ ID NO: 291, SEQ ID NO: 293, SEQ ID NO: 295, SEQ ID NO: 297, SEQ ID NO: 299, SEQ ID NO: 301, SEQ ID NO: 303, SEQ ID NO: 314, SEQ ID NO: 317, SEQ ID NO: 319, SEQ ID NO: 321, SEQ ID NO: 323, SEQ ID NO: 325, SEQ ID NO: 327, SEQ ID NO: 340, SEQ ID NO: 342, SEQ ID NO: 344, SEQ ID NO: 346, SEQ ID NO: 348, SEQ ID NO: 350, SEQ ID NO: 352, SEQ ID NO: 355, SEQ ID NO: 362, SEQ ID NO: 364, SEQ ID NO: 366, SEQ ID NO: 372, SEQ ID NO: 374, SEQ ID NO: 375, SEQ ID NO: 376, SEQ ID NO: 377, SEQ ID NO: 378, SEQ ID NO: 379. A tissue of a plant produced from the plant cell has a difference in the level of a carotenoid as compared to the corresponding level in tissue of a control plant that does not comprise the nucleic acid. The nucleotide sequence can have a sequence identity that is 85 percent or greater.

[0020] The invention also features a transgenic plant comprising an exogenous nucleic acid. The exogenous nucleic acid comprises a regulatory region operably linked to a nucleotide sequence encoding a polypeptide, in which the HMM bit score of the amino acid sequence of the polypeptide is greater than 50, the HMM based on the amino acid sequences depicted in one of FIGS. 1-9. A tissue of a plant produced from the plant cell has a difference in the level of a carotenoid as compared to the corresponding level in tissue of a control plant that does not comprise the exogenous nucleic acid. The nucleotide sequence can encode a polypeptide in which the HMM bit score of the amino acid sequence of the polypeptide is greater than 50, the HMM based on the amino acid sequences depicted in FIG. 7. The nucleotide sequence can encode a polypeptide comprising an amino acid sequence corresponding to SEQ ID NO: 110. The nucleotide sequence can encode a polypeptide comprising an amino acid sequence selected from the group consisting of SEQ ID NO: 80, SEQ ID NO: 89, SEQ ID NO: 91, SEQ ID NO: 95, SEQ ID NO: 98, SEQ ID NO: 104, SEQ ID NO: 144 and SEQ ID NO: 240.

[0021] The carotenoid in any of the above plants or plant cells can be phytoene, ζ-carotene, lycopene, δ-carotene, α-carotene, lutein, gamma-carotene, cis-β-carotene, trans-β-carotene, zeaxanthin, antheraxanthin, astaxanthin, bixin, capsanthin, fucoxanthin, or violaxanthin. The difference in the level of a carotenoid in any of the above plants or plant cells can be an increase in the level of a carotenoid, e.g., ζ-carotene, lutein, cis-β-carotene, trans-β-carotene, neoxanthin, or violaxanthin. The regulatory region in any of the above plants or plant cells can be a promoter, e.g., a tissue-preferential, broadly expressing, or inducible promoter. The plants or plant cells can be from a member of a dicot genus, for example, Lycopersicon, Lactuca, Glycine, Gossypium, or Brassica. Alternatively, the plants or plant cells can be from a member of a monocot genus, for example, Triticum, Zea, Oryza, or Musa. Progeny of any of the above plants can have a difference in the level of a carotenoid as compared to the level of a carotenoid in a corresponding control plant that does not comprise the exogenous nucleic acid. The invention also features seed, vegetative tissue, and fruit from any of the above transgenic plants. In another aspect, the invention features a food product or a feed product comprising seed or vegetative tissue from any of the above transgenic plants. The tissue in any of the above plants or plant cells can be a fruit, vegetative, tuber, or seed tissue.

[0022] In another aspect, the invention features an isolated nucleic acid molecule comprising a nucleotide sequence having 95% or greater sequence identity to the nucleotide sequence selected from the group consisting of SEQ ID NO:105 and SEQ ID NO:107. In another aspect, the invention features an isolated nucleic acid comprising a nucleotide sequence encoding a polypeptide having 80% or greater sequence identity to the amino acid sequence selected from the group consisting of SEQ ID NO:106 and SEQ ID NO:108.

[0023] The details of one or more embodiments of the invention are set forth in the accompanying drawings and the description below. Other features, objects, and advantages of the invention will be apparent from the description and drawings, and from the claims.

### DESCRIPTION OF DRAWINGS

[0024] FIG. 1 is an alignment of Ceres CLONE ID no. 34553 (SEQ ID NO:80) with homologous and/or orthologous amino acid sequences Ceres CLONE ID no. 473423 (SEQ ID NO:81), Ceres CLONE ID no. 614555 (SEQ ID NO:82), Ceres CLONE ID no. 1329993 (SEQ ID NO:83), Ceres CLONE ID no. 258825 (SEQ ID NO:84), GI no. 34903896 (SEQ ID NO:85), GI no. 57900348 (SEQ ID NO:86), and GI no. 50906641 (SEQ ID NO:87). FIG. 1 and the other alignment figures provided herein were generated using the program MUSCLE version 3.52 (Edgar, Nucleic Acids Res, 32(5):1792-97 (2004); World Wide Web at drive5.com/muscle).

[0025] FIG. 2 is an alignment of Ceres CLONE ID no. 968026 (SEQ ID NO:91) with homologous and/or orthologous amino acid sequences GI no. 28466913 (SEQ ID NO:92) and Ceres CLONE ID no. 596510 (SEQ ID NO:93).

[0026] FIG. 3 is an alignment of Ceres CLONE ID no. 13930 (SEQ ID NO:104) with homologous and/or orthologous amino acid sequences Ceres ANNOT ID no. 1475265 (SEQ ID NO:108), Ceres CLONE ID no. 1842178 (SEQ ID NO:128), GI no. 18413971 (SEQ ID NO:129), and Ceres CLONE ID no. 1044646 (SEQ ID NO:131).

[0027] FIG. 4 is an alignment of Ceres CLONE ID no. 34589 (SEQ ID NO:95) with homologous and/or orthologous amino acid sequences Ceres CLONE ID no. 975220 (SEQ ID NO:96), Ceres CLONE ID no. 1973945 (SEQ ID NO:205), Ceres ANNOT ID no. 1501772 (SEQ ID NO:210), GI no. 15221257 (SEQ ID NO:213), Ceres CLONE ID no. 1371146 (SEQ ID NO:215), Ceres CLONE ID no. 1020930 (SEQ ID NO:218), Ceres CLONE ID no. 325641 (SEQ ID NO:222), and GI no. 116310449 (SEQ ID NO:223).

[0028] FIG. 5 is an alignment of Ceres CLONE ID no. 21863 (SEQ ID NO:89) with homologous and/or orthologous amino acid sequences Truncated Version of Ceres CLONE ID no. 1918241 (SEQ ID NO:159), Truncated Version of Ceres ANNOT ID no. 1454043 (SEQ ID NO:161), Truncated Version of Ceres ANNOT ID no. 1464854 (SEQ ID NO:165), Truncated Version of Ceres CLONE ID no. 479514 (SEQ ID NO:172), Truncated Version of Ceres CLONE ID no. 987194 (SEQ ID NO:178), Truncated Version of Ceres CLONE ID no. 1780447 (SEQ ID NO:180), Truncated Version of Ceres CLONE ID no. 677852 (SEQ ID NO:182), and Truncated Version of Public GI no. 115452185 (SEQ ID NO:183).

[0029] FIG. 6 is an alignment of GI no. 18424254 (SEQ ID NO:144) with homologous and/or orthologous amino acid sequences Ceres CLONE ID no. 1918241 (SEQ ID NO:133), Ceres ANNOT ID no. 1464854 (SEQ ID NO:137), Ceres CLONE ID no. 479514 (SEQ ID NO:146), Ceres CLONE ID no. 987194 (SEQ ID NO:152), Ceres CLONE ID no. 1780447 (SEQ ID NO:154), Ceres CLONE ID no. 677852 (SEQ ID NO:156), and GI no. 115452185 (SEQ ID NO:157).

[0030] FIG. 7 is an alignment of Ceres CLONE ID no. 641355 (SEQ ID NO:110) with homologous and/or orthologous amino acid sequences Ceres CLONE ID no. 1926437 (SEQ ID NO:294), Ceres ANNOT ID no. 1463335 (SEQ ID NO:296), GI no. 15239863 (SEQ ID NO:306), Ceres CLONE ID no. 1080500 (SEQ ID NO:320), Ceres CLONE ID no. 641355 (SEQ ID NO:322), Ceres CLONE ID no. 555364 (SEQ ID NO:326), and GI no. 31432356 (SEQ ID NO:331).

[0031] FIG. 8 is an alignment of Ceres CLONE ID no. 316638 (SEQ ID NO:98) with homologous and/or orthologous amino acid sequences Truncated Version of Ceres CLONE ID no. 1929841 (SEQ ID NO:259), Truncated Version of Ceres ANNOT ID no. 1470444 (SEQ ID NO:261), Truncated Version of Public GI no. 15237901 (SEQ ID NO:262), Truncated Version of Ceres CLONE ID no. 707855 (SEQ ID NO:269), Truncated Version of Ceres CLONE ID no. 757222 (SEQ ID NO:271), Truncated Version of Ceres CLONE ID no. 1545342 (SEQ ID NO:273), Truncated Version of Ceres CLONE ID no. 1860083 (SEQ ID NO:281), and Truncated Version of Public GI no. 41052966 (SEQ ID NO:283).

[0032] FIG. 9 is an alignment of Ceres CLONE ID no. 1545342 (SEQ ID NO:240) with homologous and/or orthologous amino acid sequences Ceres CLONE ID no. 1929841 (SEQ ID NO:226), Ceres ANNOT ID no. 1470444 (SEQ ID NO:228), GI no. 15237901 (SEQ ID NO:229), Ceres CLONE ID no. 707855 (SEQ ID NO:236), Ceres CLONE ID no. 757222 (SEQ ID NO:238), Ceres CLONE ID no. 1860083 (SEQ ID NO:248), and GI no. 41052966 (SEQ ID NO:250).

### DETAILED DESCRIPTION

[0033] Carotenoids are a diverse class of metabolites derived from isoprenoid units. The conjugated chain common to all carotenoids consists of eight isoprenoid units joined end-to-end. All carotenoids may be formally derived from the canonical polyene carotenoid structure through hydrogenation, dehydrogenation, cyclization, oxidation or any combination of these processes. Carotenoids can also include compounds that arise from degradations of the carbon skeleton, provided that the two central methyl groups are maintained. Carotenoids are generally divided into two classes: the carotenes, which are unoxidized, and the xanthophylls, in which some of the double bonds have been oxidized. Useful carotenoids include molecules from both classes, for example, α-, β-, and ζ-carotenes and xanthophylls, e.g. lutein and zeaxanthin.

[0034] The invention features methods and materials related to modulating (e.g., increasing or decreasing) carotenoid levels in plants. The methods can include transforming a plant cell with a nucleic acid encoding a carotenoid-modulating polypeptide, wherein expression of the polypeptide results in a modulated level of one or more carotenoids. Plant cells produced using such methods can be grown to produce plants having an increased or decreased carotenoid content. Such plants may be used to produce, for example, foodstuffs and animal feed having an increased nutritional content, and/or modified appearance or color, which may benefit both food producers and consumers, or can be used as sources from which to extract one or more carotenoids.

[0035] Polypeptides

[0036] The term “polypeptide” as used herein refers to a compound of two or more subunit amino acids, amino acid analogs, or other peptidomimetics, regardless of post-translational modification, e.g., phosphorylation or glycosylation. The subunits may be linked by peptide bonds or other bonds such as, for example, ester or ether bonds. The term “amino acid” refers to natural and/or unnatural or synthetic amino acids, including D/L optical isomers. Full-length proteins, analogs, mutants, and fragments thereof are encompassed by this definition.

[0037] Polypeptides described herein include carotenoid-modulating polypeptides. carotenoid-modulating polypeptides can be effective to modulate carotenoid levels when expressed in a plant or plant cell. Modulation of the level of carotenoid can be either an increase or a decrease in the level of carotenoid relative to the corresponding level in a control plant.

[0038] A carotenoid-modulating polypeptide can be a transcription factor, such as a basic-leucine zipper (bZIP) transcription factor polypeptide. Transcription factors are a diverse class of proteins that regulate gene expression through specific DNA binding events. Transcription factors are involved in a variety of regulatory networks of genes in plants, including those genes responsible for the biosynthesis of metabolites. Transcription factors include a number of characteristic structural motifs that mediate interactions with nucleic acids. The bZIP transcription factors of eukaryotes are polypeptide that contain a basic region mediating sequence-specific DNA-binding, followed by a leucine zipper region, which is required for dimerization. Such polypeptides can serve as structural platforms for DNA binding and/or protein-protein interactions. SEQ ID NO:80 sets forth the amino acid sequence of an Arabidopsis clone, identified herein as Ceres CLONE ID no. 34553 (SEQ ID NO:79), that is predicted to encode a bZIP transcription factor containing a bZIP_{—}2 domain.

[0039] A carotenoid-modulating polypeptide can comprise the amino acid sequence set forth in SEQ ID NO:80. Alternatively, a carotenoid-modulating polypeptide can be a homolog, ortholog, or variant of the polypeptide having the amino acid sequence set forth in SEQ ID NO:80. For example, a carotenoid-modulating polypeptide can have an amino acid sequence with at least 45% sequence identity, e.g., 45%, 50%, 55%, 60%, 65%, 70%, 75%, 80%, 85%, 90%, 95%, 97%, 98%, or 99% sequence identity, to the amino acid sequence set forth in SEQ ID NO:80.

[0040] Amino acid sequences of homologs and/or orthologs of the polypeptide having the amino acid sequence set forth in SEQ ID NO:80 are provided in FIG. 1. The alignment in FIG. 1 provides the amino acid sequences of Ceres CLONE ID no. 34553 (SEQ ID NO:80), Ceres CLONE ID no. 473423 (SEQ ID NO:81), Ceres CLONE ID no. 614555 (SEQ ID NO:82), Ceres CLONE ID no. 1329993 (SEQ ID NO:83), Ceres CLONE ID no. 258825 (SEQ ID NO:84), GI no. 34903896 (SEQ ID NO:85), GI no. 57900348 (SEQ ID NO:86), and GI no. 50906641 (SEQ ID NO:87). Other homologs and/or orthologs include Ceres ANNOT ID no. 1534144 (SEQ ID NO:185), Ceres ANNOT ID no. 1441679 (SEQ ID NO:187), Ceres ANNOT ID no. 1480659 (SEQ ID NO:189), Ceres ANNOT ID no. 1479838 (SEQ ID NO:191), Ceres ANNOT ID no. 1533308 (SEQ ID NO:193), Ceres CLONE ID no. 463380 (SEQ ID NO:195), GI no. 113367174 (SEQ ID NO:196), Ceres CLONE ID no. 908192 (SEQ ID NO:198), GI no. 125538797 (SEQ ID NO:199), GI no. 115435234 (SEQ ID NO:200), GI no. 115440013 (SEQ ID NO:201), GI no. 125581476 (SEQ ID NO:202), and GI no. 115445299 (SEQ ID NO:203).

[0041] In some cases, a carotenoid-modulating polypeptide includes a polypeptide having at least 80% sequence identity, e.g., 80%, 85%, 90%, 95%, 97%, 98%, or 99% sequence identity, to an amino acid sequence corresponding to SEQ ID NO:81, SEQ ID NO:82, SEQ ID NO:83, SEQ ID NO:84, SEQ ID NO:85, SEQ ID NO:86, SEQ ID NO:87, SEQ ID NO:185, SEQ ID NO:187, SEQ ID NO:189, SEQ ID NO:191, SEQ ID NO:193, SEQ ID NO:195, SEQ ID NO:196, SEQ ID NO:198, SEQ ID NO:199, SEQ ID NO:200, SEQ ID NO:201, SEQ ID NO:202, or SEQ ID NO:203.

[0042] A carotenoid-modulating polypeptide can have a zf-C3HC4 domain characteristic of a C3HC4 type (RING finger) zinc-finger polypeptide. The RING finger is a specialized type of zinc-finger of 40 to 60 residues that binds two atoms of zinc and is reported to be involved in mediating polypeptide-polypeptide interactions. There are two different variants, the C3HC4-type and a C3H2C3-type, which are related despite the different cysteine/histidine pattern. The RING domain has been implicated in diverse biological processes. Ubiquitin-protein ligases (E3s), which determine the substrate specificity for ubiquitylation, have been classified into HECT and RING-finger families. Various RING fingers exhibit binding to E2 ubiquitin-conjugating enzymes. The ubiquitin-proteosome pathway is a key metabolic route for protein degradation in plant and animal cells. As proteins become destined for degradation, they are tagged by the covalent addition of one or more molecules of ubiquitin, a small protein that acts as a molecular marker that helps to direct the condemned protein to the proteosome, an organelle where proteolysis takes place. Ubiquitin protein ligases are a multigene family of enzymes responsible for the attachment of ubiquitin to lysine residues on the target proteins. Ceres CLONE ID no. 21863 (SEQ ID NO:89) is predicted to encode a polypeptide having a zf-C3HC4 domain. A carotenoid-modulating polypeptide can comprise the amino acid sequence set forth in SEQ ID NO:89. Alternatively, a carotenoid-modulating polypeptide can be a homolog, ortholog, or variant of the polypeptide having the amino acid sequence set forth in SEQ ID NO:89. For example, a carotenoid-modulating polypeptide can have an amino acid sequence with at least 45% sequence identity, e.g., 45%, 50%, 55%, 60%, 65%, 70%, 75%, 80%, 85%, 90%, 95%, 97%, 98%, or 99% sequence identity, to the amino acid sequence set forth in SEQ ID NO:89.

[0043] Amino acid sequences of homologs and/or orthologs of the polypeptide having the amino acid sequence set forth in SEQ ID NO:89 are provided in FIG. 5. The alignment in FIG. 5 provides the amino acid sequences of Ceres CLONE ID no. 21863 (SEQ ID NO:89), Truncated Version of Ceres CLONE ID no. 1918241 (SEQ ID NO:159), Truncated Version of Ceres ANNOT ID no. 1454043 (SEQ ID NO:161), Truncated Version of Ceres ANNOT ID no. 1464854 (SEQ ID NO:165), Truncated Version of Ceres CLONE ID no. 479514 (SEQ ID NO:172), Truncated Version of Ceres CLONE ID no. 987194 (SEQ ID NO:178), Truncated Version of Ceres CLONE ID no. 1780447 (SEQ ID NO:180), Truncated Version of Ceres CLONE ID no. 677852 (SEQ ID NO:182), and Truncated Version of Public GI no. 115452185 (SEQ ID NO:183). Other homologs and/or orthologs include Truncated Version of Ceres CLONE ID no. 1938564 (SEQ ID NO:163), Truncated Version of Ceres ANNOT ID no. 1511378 (SEQ ID NO:167), Truncated Version of Ceres ANNOT ID no. 1458137 (SEQ ID NO:169), Truncated Version of Public GI no. 18424254 (SEQ ID NO:170), Truncated Version of Ceres CLONE ID no. 1240790 (SEQ ID NO:174), and Truncated Version of Ceres CLONE ID no. 942216 (SEQ ID NO:176).

[0044] In some cases, a carotenoid-modulating polypeptide includes a polypeptide having at least 80% sequence identity, e.g., 80%, 85%, 90%, 95%, 97%, 98%, or 99% sequence identity, to an amino acid sequence corresponding to SEQ ID NO:159, SEQ ID NO:161, SEQ ID NO:163, SEQ ID NO:165, SEQ ID NO:167, SEQ ID NO:169, SEQ ID NO:170, SEQ ID NO:172, SEQ ID NO:174, SEQ ID NO:176, SEQ ID NO:178, SEQ ID NO:180, SEQ ID NO:182, or SEQ ID NO:183.

[0045] In some cases, a carotenoid-modulating polypeptide can contain a zf-C3HC4 domain described herein and a DUF1117 domain present in the carboxy-terminus of a number of plant polypeptides. SEQ ID NO:144 sets forth the amino acid sequence of a polypeptide having a zf-C3HC4 domain and a DUF1117 domain.

[0046] A carotenoid-modulating polypeptide can comprise the amino acid sequence set forth in SEQ ID NO:144. Alternatively, a carotenoid-modulating polypeptide can be a homolog, ortholog, or variant of the polypeptide having the amino acid sequence set forth in SEQ ID NO:144. For example, a carotenoid-modulating polypeptide can have an amino acid sequence with at least 40% sequence identity, e.g., 41%, 45%, 50%, 55%, 60%, 65%, 70%, 75%, 80%, 85%, 90%, 91%, 92%, 93%, 94%, 95%, 96%, 97%, 98%, or 99% sequence identity, to the amino acid sequence set forth in SEQ ID NO:144.

[0047] Amino acid sequences of homologs and/or orthologs of the polypeptide having the amino acid sequence set forth in SEQ ID NO:144 are provided in FIG. 6. The alignment in FIG. 6 provides the amino acid sequences of GI no. 18424254 (SEQ ID NO:144), Ceres CLONE ID no. 1918241 (SEQ ID NO:133), Ceres ANNOT ID no. 1464854 (SEQ ID NO:137), Ceres CLONE ID no. 479514 (SEQ ID NO:146), Ceres CLONE ID no. 987194 (SEQ ID NO:152), Ceres CLONE ID no. 1780447 (SEQ ID NO:154), Ceres CLONE ID no. 677852 (SEQ ID NO:156), and GI no. 115452185 (SEQ ID NO:157). Other homologs and/or orthologs include Ceres CLONE ID no. 1938564 (SEQ ID NO:135), Ceres ANNOT ID no. 1511378 (SEQ ID NO:139), Ceres ANNOT ID no. 1458137 (SEQ ID NO:141), Ceres ANNOT ID no. 1454043 (SEQ ID NO:143), Ceres CLONE ID no. 1240790 (SEQ ID NO:148), and Ceres CLONE ID no. 942216 (SEQ ID NO:150).

[0048] In some cases, a carotenoid-modulating polypeptide includes a polypeptide having at least 80% sequence identity, e.g., 80%, 85%, 90%, 95%, 97%, 98%, or 99% sequence identity, to an amino acid sequence corresponding to SEQ ID NO:133, SEQ ID NO:135, SEQ ID NO:137, SEQ ID NO:139, SEQ ID NO:141, SEQ ID NO:143, SEQ ID NO:146, SEQ ID NO:148, SEQ ID NO:150, SEQ ID NO:152, SEQ ID NO:154, SEQ ID NO:156, or SEQ ID NO:157.

[0049] A carotenoid-modulating polypeptide can be a response regulator protein. Response regulator proteins are a family of polypeptides that function as phosphoaccepting receivers in the histidine-aspartate phosphorelay signal transduction system. Response regulators play critical roles in cytokinin signaling circuitry and as such, are involved in a wide range of cellular processes including circadian rhythms and light-signal responses. SEQ ID NO:91 sets forth the amino acid sequence of a Brassica napus clone, identified herein as Ceres CLONE ID no. 968026 (SEQ ID NO:90), that is predicted to encode an amino acid response regulator 6 protein.

[0050] A carotenoid-modulating polypeptide can comprise the amino acid sequence set forth in SEQ ID NO:91. Alternatively, a carotenoid-modulating polypeptide can be a homolog, ortholog, or variant of the polypeptide having the amino acid sequence set forth in SEQ ID NO:91. For example, a carotenoid-modulating polypeptide can have an amino acid sequence with at least 45% sequence identity, e.g., 45%, 50%, 55%, 60%, 65%, 70%, 75%, 80%, 85%, 90%, 95%, 97%, 98%, or 99% sequence identity, to the amino acid sequence set forth in SEQ ID NO:91.

[0051] Amino acid sequences of homologs and/or orthologs of the polypeptide having the amino acid sequence set forth in SEQ ID NO:91 are provided in FIG. 2. The alignment in FIG. 2 provides the amino acid sequences of Ceres CLONE ID no. 968026 (SEQ ID NO:91), GI no. 28466913 (SEQ ID NO:92), and Ceres CLONE ID no. 596510 (SEQ ID NO:93). Other homologs and/or orthologs include Ceres CLONE ID no. 1832286 (SEQ ID NO:341), Ceres CLONE ID no. 1932920 (SEQ ID NO:343), Ceres ANNOT ID no. 1473516 (SEQ ID NO:345), Ceres ANNOT ID no. 1526929 (SEQ ID NO:347), Ceres ANNOT ID no. 1474764 (SEQ ID NO:349), Ceres ANNOT ID no. 1443270 (SEQ ID NO:351), Ceres ANNOT ID no. 1496190 (SEQ ID NO:353), GI no. 15242000 (SEQ ID NO:354), Ceres CLONE ID no. 34579 (SEQ ID NO:356), GI no. 15228338 (SEQ ID NO:357), GI no. 3953599 (SEQ ID NO:358), GI no. 3323581 (SEQ ID NO:359), GI no. 3953605 (SEQ ID NO:360), GI no. 15230202 (SEQ ID NO:361), Ceres CLONE ID no. 1240183 (SEQ ID NO:363), Ceres CLONE ID no. 775387 (SEQ ID NO:365), Ceres CLONE ID no. 916238 (SEQ ID NO:367), GI no. 12060388 (SEQ ID NO:368), GI no. 90265238 (SEQ ID NO:369), GI no. 115484121 (SEQ ID NO:370), and GI no. 87116390 (SEQ ID NO:371).

[0052] In some cases, a carotenoid-modulating polypeptide includes a polypeptide having at least 80% sequence identity, e.g., 80%, 85%, 90%, 95%, 97%, 98%, or 99% sequence identity, to an amino acid sequence corresponding to SEQ ID NO:92, SEQ ID NO:93, SEQ ID NO:341, SEQ ID NO:343, SEQ ID NO:345, SEQ ID NO:347, SEQ ID NO:349, SEQ ID NO:351, SEQ ID NO:353, SEQ ID NO:354, SEQ ID NO:356, SEQ ID NO:357, SEQ ID NO:358, SEQ ID NO:359, SEQ ID NO:360, SEQ ID NO:361, SEQ ID NO:363, SEQ ID NO:365, SEQ ID NO:367, SEQ ID NO:368, SEQ ID NO:369, SEQ ID NO:370, and SEQ ID NO:371.

[0053] A carotenoid-modulating polypeptide can contain an AP2 domain characteristic of polypeptides belonging to the AP2/EREBP family of plant transcription factor polypeptides. AP2 (APETALA2) and EREBPs (ethylene-responsive element binding proteins) are prototypic members of a family of transcription factors unique to plants, whose distinguishing characteristic is that they contain the so-called AP2 DNA binding domain. AP2/EREBP genes form a large multigene family encoding polypeptides that are key regulators of several developmental processes, such as floral organ identity determination and control of leaf epidermal cell identity, and forming part of the mechanisms used by plants to respond to various types of biotic and environmental stress. For example, AP2 DNA-binding domains are common to many proteins involved in the regulation of ethylene, jasmonate and abscisic acid signaling pathways and responses to environmental stress such as cold, drought and high salt conditions. SEQ ID NO:110 sets forth the amino acid sequence of an Arabidopsis thaliana clone, identified herein as Ceres CLONE ID no. 641355, that is predicted to encode a polypeptide having an AP2 domain.

[0054] A carotenoid-modulating polypeptide can be an Arabidopsis polypeptide having the amino acid sequence set forth in SEQ ID NO:110. Alternatively, a carotenoid-modulating polypeptide can be a homolog, ortholog, or variant of the polypeptide having the amino acid sequence set forth in SEQ ID NO:110. For example, a carotenoid-modulating polypeptide can have an amino acid sequence with at least 45% sequence identity, e.g., 45%, 50%, 55%, 60%, 65%, 70%, 75%, 80%, 85%, 90%, 95%, 97%, 98%, or 99% sequence identity, to the amino acid sequence set forth in SEQ ID NO:110.

[0055] Amino acid sequences of homologs and/or orthologs of the polypeptide having the amino acid sequence set forth in SEQ ID NO:110 are provided in FIG. 7. The alignment in FIG. 7 provides the amino acid sequences of Ceres CLONE ID no. 641355 (SEQ ID NO:110), Ceres CLONE ID no. 1926437 (SEQ ID NO:294), Ceres ANNOT ID no. 1463335 (SEQ ID NO:296), GI no. 15239863 (SEQ ID NO:306), Ceres CLONE ID no. 1080500 (SEQ ID NO:320), Ceres CLONE ID no. 641355 (SEQ ID NO:322), Ceres CLONE ID no. 555364 (SEQ ID NO:326), and GI no. 31432356 (SEQ ID NO:331). Other homologs and/or orthologs include Ceres CLONE ID no. 1849534 (SEQ ID NO:292), Ceres ANNOT ID no. 1463334 (SEQ ID NO:298), Ceres ANNOT ID no. 1442765 (SEQ ID NO:300), Ceres ANNOT ID no. 1442760 (SEQ ID NO:302), Ceres ANNOT ID no. 1446840 (SEQ ID NO:304), GI no. 42565130 (SEQ ID NO:305), GI no. 116831575 (SEQ ID NO:307), GI no. 48479320 (SEQ ID NO:308), GI no. 145338854 (SEQ ID NO:309), GI no. 48479286 (SEQ ID NO:310), GI no. 21264420 (SEQ ID NO:311), GI no. 25350257 (SEQ ID NO:312), GI no. 25350258 (SEQ ID NO:313), Ceres CLONE ID no. 6042 (SEQ ID NO:315), GI no. 18414897 (SEQ ID NO:316), Ceres CLONE ID no. 965028 (SEQ ID NO:318), Ceres CLONE ID no. 907605 (SEQ ID NO:324), Ceres CLONE ID no. 569593 (SEQ ID NO:328), GI no. 125547473 (SEQ ID NO:329), GI no. 125562586 (SEQ ID NO:330), GI no. 125574952 (SEQ ID NO:332), GI no. 115450749 (SEQ ID NO:333), GI no. 125584936 (SEQ ID NO:334), GI no. 115457454 (SEQ ID NO:335), GI no. 52076099 (SEQ ID NO:336), GI no. 28071302 (SEQ ID NO:337), GI no. 115439973 (SEQ ID NO:338), and GI no. 57899163 (SEQ ID NO:339).

[0056] In some cases, a carotenoid-modulating polypeptide includes a polypeptide having at least 80% sequence identity, e.g., 80%, 85%, 90%, 95%, 97%, 98%, or 99% sequence identity, to an amino acid sequence corresponding to SEQ ID NO:292, SEQ ID NO:294, SEQ ID NO:296, SEQ ID NO:298, SEQ ID NO:300, SEQ ID NO:302, SEQ ID NO:304, SEQ ID NO:305, SEQ ID NO:306, SEQ ID NO:307, SEQ ID NO:308, SEQ ID NO:309, SEQ ID NO:310, SEQ ID NO:311, SEQ ID NO:312, SEQ ID NO:313, SEQ ID NO:315, SEQ ID NO:316, SEQ ID NO:318, SEQ ID NO:320, SEQ ID NO:322, SEQ ID NO:324, SEQ ID NO:326, SEQ ID NO:328, SEQ ID NO:329, SEQ ID NO:330, SEQ ID NO:331, SEQ ID NO:332, SEQ ID NO:333, SEQ ID NO:334, SEQ ID NO:335, SEQ ID NO:336, SEQ ID NO:337, SEQ ID NO:338, or SEQ ID NO:339.

[0057] A carotenoid-modulating polypeptide can be a tetratricopeptide repeat domain-containing protein. Tetratricopeptide repeats (TPR) are degenerate motifs that include a 34 amino acid long pair of anti-parallel α-helices linked by a short loop region. TPRs are often further arranged into large super-helical arrays of between 3 and 20 repeats that provide a contiguous surface involved in mediating protein-protein interactions. TPR domain proteins are involved in the regulation of a range of cellular and developmental processes, including protein translocation, asymmetric cell divisions and hormone signaling. Ceres Clone 13930 (SEQ ID NO: 104) is predicted to encode a TPR domain protein.

[0058] A carotenoid-modulating polypeptide can be an Arabidopsis polypeptide having the amino acid sequence set forth in SEQ ID NO: 104. Alternatively, a carotenoid-modulating polypeptide can be a homolog, ortholog, or variant of the polypeptide having the amino acid sequence set forth in SEQ ID NO: 104. For example, a carotenoid-modulating polypeptide can have an amino acid sequence with at least 45% sequence identity, e.g., 45%, 50%, 55%, 60%, 65%, 70%, 75%, 80%, 85%, 90%, 95%, 97%, 98%, or 99% sequence identity, to the amino acid sequence set forth in SEQ ID NO: 104. Amino acid sequences of homologs and/or orthologs of the polypeptide having the amino acid sequence set forth in SEQ ID NO: 104 are provided in FIG. 3. The alignment in FIG. 3 provides the amino acid sequences of Ceres Clone 13930 (SEQ ID NO: 104), Public GI no. 18413971 (SEQ ID NO: 129), Ceres CLONE ID no. 1044646 (SEQ ID NO: 131), Ceres ANNOT ID no. 1475265 (SEQ ID NO: 108) and Ceres CLONE ID no. 1842178 (SEQ ID NO: 128). Other homologs and/or orthologs include Ceres ANNOT ID no. 1455046 (SEQ ID 106). In some cases, a carotenoid-modulating polypeptide includes a polypeptide having at least 80% sequence identity, e.g., 80%, 85%, 90%, 95%, 97%, 98%, or 99% sequence identity, to an amino acid sequence corresponding to SEQ ID NO: 129, SEQ ID NO: 106, SEQ ID NO: 108, SEQ ID NO: 131, or SEQ ID NO: 128.

[0059] A carotenoid-modulating polypeptide can be a Myb-like DNA binding domain-containing protein. Myb-like DNA-binding domains are characteristic of a multi-gene family of DNA-binding proteins that specifically recognize the sequence YAAC(G/T)G. ‘Classical’ MYB factors, which are related to the protooncogene, c-MYB, are involved in the control of the cell cycle, while R2R3-type MYB genes control many aspects of plant secondary metabolism, as well as the identity and fate of plant cells. Ceres Clone 34589 (SEQ ID NO: 95) is predicted to encode a Myb-like DNA binding domain-containing polypeptide.

[0060] A carotenoid-modulating polypeptide can be an Arabidopsis polypeptide having the amino acid sequence set forth in SEQ ID NO: 95. Alternatively, a carotenoid-modulating polypeptide can be a homolog, ortholog, or variant of the polypeptide having the amino acid sequence set forth in SEQ ID NO: 95. For example, a carotenoid-modulating polypeptide can have an amino acid sequence with at least 45% sequence identity, e.g., 45%, 50%, 55%, 60%, 65%, 70%, 75%, 80%, 85%, 90%, 95%, 97%, 98%, or 99% sequence identity, to the amino acid sequence set forth in SEQ ID NO: 95.

[0061] Amino acid sequences of homologs and/or orthologs of the polypeptide having the amino acid sequence set forth in SEQ ID NO: 95 are provided in FIG. 4. The alignment in FIG. 4 provides the amino acid sequences of Ceres Clone 34589 (SEQ ID NO: 95), Public GI no. 15221257 (SEQ ID NO: 213), Ceres ANNOT ID no. 1501772 (SEQ ID NO: 210), Ceres CLONE ID no. 1371146 (SEQ ID NO: 215), Ceres CLONE ID no. 1020930 (SEQ ID NO: 218), Ceres CLONE ID no. 325641 (SEQ ID NO: 222), Ceres Clone 975220 (SEQ ID NO: 96), Ceres CLONE ID no. 1973945 (SEQ ID NO: 205, and Public GI no. 116310449 (SEQ ID NO: 223). Other homologs and/or orthologs include Public GI no. 13346188 (SEQ ID NO: 206), Ceres ANNOT ID no. 1448769 (SEQ ID NO: 208), Ceres ANNOT ID no. 1465830 (SEQ ID NO: 212), Public GI no. 110931782 (SEQ ID NO: 216), Ceres CLONE ID no. 764797 (SEQ ID NO: 220) and Public GI no. 115458786 (SEQ ID NO: 224).

[0062] In some cases, a carotenoid-modulating polypeptide includes a polypeptide having at least 80% sequence identity, e.g., 80%, 85%, 90%, 95%, 97%, 98%, or 99% sequence identity, to an amino acid sequence corresponding to SEQ ID NO: 96, SEQ ID NO: 213, SEQ ID NO: 210, SEQ ID NO: 215, SEQ ID NO: 218, SEQ ID NO: 205, SEQ ID NO: 222, SEQ ID NO: 206, SEQ ID NO: 208, SEQ ID NO: 212, SEQ ID NO: 216, SEQ ID NO: 220, SEQ ID NO: 223 and SEQ ID NO: 224.

[0063] A carotenoid-modulating polypeptide can be an ADP ribosylation factor. ADP ribosylation factors (ARFs) are members of the Ras superfamily of GTP binding proteins. ARFs are highly conserved, ubiquitously expressed in eukaryotic cells and appear to be involved in vesicular protein transport. Vesicle trafficking in plants is important in the delivery of proteins to intra- and extra-cellular compartments, e.g., the delivery of cellulose synthase to the plasma membrane and non-cellulosic polysaccharides to the cell wall. Ceres Clone 316638 (SEQ ID NO: 98) is predicted to encode an ADP ribosylation factor polypeptide.

[0064] A carotenoid-modulating polypeptide can be an Arabidopsis polypeptide having the amino acid sequence set forth in SEQ ID NO: 98. Alternatively, a carotenoid-modulating polypeptide can be a homolog, ortholog, or variant of the polypeptide having the amino acid sequence set forth in SEQ ID NO: 98. For example, a carotenoid-modulating polypeptide can have an amino acid sequence with at least 45% sequence identity, e.g., 45%, 50%, 55%, 60%, 65%, 70%, 75%, 80%, 85%, 90%, 95%, 97%, 98%, or 99% sequence identity, to the amino acid sequence set forth in SEQ ID NO: 98.

[0065] Amino acid sequences of homologs and/or orthologs of the polypeptide having the amino acid sequence set forth in SEQ ID NO: 98 are provided in FIG. 8. The alignment in FIG. 8 provides the amino acid sequences of Ceres Clone 316638 (SEQ ID NO: 98), Ceres CLONE ID no. 316638 (SEQ ID NO:98) with homologous and/or orthologous amino acid sequences Truncated Version of Ceres CLONE ID no. 1929841 (SEQ ID NO:259), Truncated Version of Ceres ANNOT ID no. 1470444 (SEQ ID NO:261), Truncated Version of Public GI no. 15237901 (SEQ ID NO:262), Truncated Version of Ceres CLONE ID no. 707855 (SEQ ID NO:269), Truncated Version of Ceres CLONE ID no. 757222 (SEQ ID NO:271), Truncated Version of Ceres CLONE ID no. 1545342 (SEQ ID NO:273), Truncated Version of Ceres CLONE ID no. 1860083 (SEQ ID NO:281), and Truncated Version of Public GI no. 41052966 (SEQ ID NO:283).

[0066] Other homologs and/or orthologs include Ceres CLONE ID no. 973476 (SEQ ID NO: 100), Ceres Clone 911175 (SEQ ID NO: 101), Truncated Version Of Ceres CLONE ID no. 26844 (SEQ ID NO: 264), Truncated Version Of Public GI no. 15228464 (SEQ ID NO: 265), Truncated Version Of Ceres CLONE ID no. 124385 (SEQ ID NO: 267), Truncated Version Of Ceres CLONE ID no. 275632 (SEQ ID NO: 275), Truncated Version Of Ceres CLONE ID no. 306269 (SEQ ID NO: 277), Truncated Version Of Ceres CLONE ID no. 295292 (SEQ ID NO: 279), Truncated Version Of Public GI no. 125537931 (SEQ ID NO: 282), Truncated Version Of Public GI no. 115448099 (SEQ ID NO: 284), Truncated Version Of Public GI no. 115483682 (SEQ ID NO: 285), Truncated Version Of Public GI no. 78709066 (SEQ ID NO: 286), Truncated Version Of Public GI no. 110289664 (SEQ ID NO: 287), Truncated Version Of Public GI no. 115443985 (SEQ ID NO: 288), Truncated Version Of Public GI no. 125580669 (SEQ ID NO: 289) and Truncated Version Of Public GI no. 7248402 (SEQ ID NO: 290).

[0067] In some cases, a carotenoid-modulating polypeptide includes a polypeptide having at least 80% sequence identity, e.g., 80%, 85%, 90%, 95%, 97%, 98%, or 99% sequence identity, to an amino acid sequence corresponding to SEQ ID NO: 100, SEQ ID NO: 101, SEQ ID NO: 264, SEQ ID NO: 265, SEQ ID NO: 267, SEQ ID NO: 275, SEQ ID NO: 277, SEQ ID NO: 279, SEQ ID NO: 282, SEQ ID NO: 284, SEQ ID NO: 285, SEQ ID NO: 286, SEQ ID NO: 287, SEQ ID NO: 288, SEQ ID NO: 289 and SEQ ID NO: 290.

[0068] In some cases, a carotenoid-modulating polypeptide can be an ADP ribosylation factor having the amino acid sequence set forth in SEQ ID NO: 240. Alternatively, a carotenoid-modulating polypeptide can be a homolog, ortholog, or variant of the polypeptide having the amino acid sequence set forth in SEQ ID NO:240. For example, a carotenoid-modulating polypeptide can have an amino acid sequence with at least 40% sequence identity, e.g., 41%, 45%, 50%, 55%, 60%, 65%, 70%, 75%, 80%, 85%, 90%, 91%, 92%, 93%, 94%, 95%, 96%, 97%, 98%, or 99% sequence identity, to the amino acid sequence set forth in SEQ ID NO:240.

[0069] Amino acid sequences of homologs and/or orthologs of the polypeptide having the amino acid sequence set forth in SEQ ID NO:240 are provided in FIG. 9. The alignment in FIG. 9 provides the amino acid sequences of Ceres CLONE ID no. 1929841 (SEQ ID NO:226), Ceres ANNOT ID no. 1470444 (SEQ ID NO:228), GI no. 15237901 (SEQ ID NO:229), Ceres CLONE ID no. 707855 (SEQ ID NO:236), Ceres CLONE ID no. 757222 (SEQ ID NO:238), Ceres CLONE ID no. 1860083 (SEQ ID NO:248), and GI no. 41052966 (SEQ ID NO:250).

[0070] Other homologs and/or orthologs include Public GI no. 78709067 (SEQ ID NO: 99), Public GI no. 1184987 (SEQ ID NO:102), (SEQ ID NO:231), (SEQ ID NO:232), (SEQ ID NO:234), (SEQ ID NO:242), (SEQ ID NO:244), (SEQ ID NO:246), (SEQ ID NO:249), (SEQ ID NO:251), (SEQ ID NO:252), (SEQ ID NO:253), (SEQ ID NO:254), (SEQ ID NO:255), (SEQ ID NO:256) and (SEQ ID NO:257).

[0071] In some cases, a carotenoid-modulating polypeptide includes a polypeptide having at least 80% sequence identity, e.g., 80%, 85%, 90%, 95%, 97%, 98%, or 99% sequence identity, to an amino acid sequence corresponding to SEQ ID NO:99, SEQ ID NO:102, SEQ ID NO:231, SEQ ID NO:232, SEQ ID NO:234, SEQ ID NO:242, SEQ ID NO:244, SEQ ID NO:246, SEQ ID NO:249, SEQ ID NO:251, SEQ ID NO:252, SEQ ID NO:253, SEQ ID NO:254, SEQ ID NO:255, SEQ ID NO:256, or SEQ ID NO:257.

[0072] A carotenoid-modulating polypeptide encoded by a recombinant nucleic acid can be a native carotenoid-modulating polypeptide, i.e., one or more additional copies of the coding sequence for a carotenoid-modulating polypeptide that is naturally present in the cell. Alternatively, a carotenoid-modulating polypeptide can be heterologous to the cell, e.g., a transgenic Lycopersicon plant can contain the coding sequence for a carotenoid-modulating polypeptide from a Glycine plant.

[0073] A carotenoid-modulating polypeptide can include additional amino acids that are not involved in carotenoid modulation, and thus can be longer than would otherwise be the case. For example, a carotenoid-modulating polypeptide can include an amino acid sequence that functions as a reporter. Such a carotenoid-modulating polypeptide can be a fusion protein in which a green fluorescent protein (GFP) polypeptide is fused to, e.g., SEQ ID NO: 80, or in which a yellow fluorescent protein (YFP) polypeptide is fused to, e.g., SEQ ID NO: 81. In some embodiments, a carotenoid-modulating polypeptide includes a purification tag, a chloroplast transit peptide, a mitochondrial transit peptide, an amyloplast transit peptide or a leader sequence added to the amino or carboxy terminus.

[0074] Carotenoid-modulating polypeptides suitable for use in the invention can be identified by analysis of nucleotide and polypeptide sequence alignments. For example, performing a query on a database of nucleotide or polypeptide sequences can identify homologs and/or orthologs of carotenoid-modulating polypeptides. Sequence analysis can involve BLAST, Reciprocal BLAST, or PSI-BLAST analysis of nonredundant databases using known carotenoid-modulating polypeptide amino acid sequences. Those polypeptides in the database that have greater than 40% sequence identity can be identified as candidates for further evaluation for suitability as a carotenoid-modulating polypeptide. Amino acid sequence similarity allows for conservative amino acid substitutions, such as substitution of one hydrophobic residue for another or substitution of one polar residue for another. If desired, manual inspection of such candidates can be carried out in order to narrow the number of candidates to be further evaluated. Manual inspection can be performed by selecting those candidates that appear to have domains suspected of being present in carotenoid-modulating polypeptides, e.g., conserved functional domains.

[0075] The identification of conserved regions in a template or subject polypeptide can facilitate production of variants of wild type carotenoid-modulating polypeptides. Conserved regions can be identified by locating a region within the primary amino acid sequence of a template polypeptide that is a repeated sequence, forms some secondary structure (e.g., helices and beta sheets), establishes positively or negatively charged domains, or represents a protein motif or domain. See, e.g., the Pfam web site describing consensus sequences for a variety of protein motifs and domains at sanger.ac.uk/Pfam and genome.wustl.edu/Pfam. A description of the information included at the Pfam database is described in Sonnhammer et al., Nucl. Acids Res., 26:320-322 (1998); Sonnhammer et al., Proteins, 28:405-420 (1997); and Bateman et al., Nucl. Acids Res., 27:260-262 (1999).

[0076] Conserved regions also can be determined by aligning sequences of the same or related polypeptides from closely related species. Closely related species preferably are from the same family. In some embodiments, alignment of sequences from two different species is adequate. For example, sequences from Arabidopsis and Zea mays can be used to identify one or more conserved regions.

[0077] Typically, polypeptides that exhibit at least about 40% amino acid sequence identity are useful to identify conserved regions. Conserved regions of related polypeptides can exhibit at least 45% amino acid sequence identity (e.g., at least 50%, at least 60%, at least 70%, at least 80%, or at least 90% amino acid sequence identity). In some embodiments, a conserved region of target and template polypeptides exhibit at least 92%, 94%, 96%, 98%, or 99% amino acid sequence identity. Amino acid sequence identity can be deduced from amino acid or nucleotide sequences. In certain cases, highly conserved domains have been identified within carotenoid-modulating polypeptides. These conserved regions can be useful in identifying functionally similar (orthologous) carotenoid-modulating polypeptides.

[0078] In some instances, suitable carotenoid-modulating polypeptides can be synthesized on the basis of consensus functional domains and/or conserved regions in polypeptides that are homologous carotenoid-modulating polypeptides. Domains are groups of substantially contiguous amino acids in a polypeptide that can be used to characterize protein families and/or parts of proteins. Such domains have a “fingerprint” or “signature” that can comprise conserved (1) primary sequence, (2) secondary structure, and/or (3) three-dimensional conformation. Generally, domains are correlated with specific in vitro and/or in vivo activities. A domain can have a length of from 10 amino acids to 400 amino acids, e.g., 10 to 50 amino acids, or 25 to 100 amino acids, or 35 to 65 amino acids, or 35 to 55 amino acids, or 45 to 60 amino acids, or 200 to 300 amino acids, or 300 to 400 amino acids.

[0079] Representative homologs and/or orthologs of carotenoid-modulating polypeptides are shown in FIGS. 1-9. Each Figure represents an alignment of the amino acid sequence of a carotenoid-modulating polypeptide with the amino acid sequences of corresponding homologs and/or orthologs. Amino acid sequences of carotenoid-modulating polypeptides and their corresponding homologs and/or orthologs have been aligned to identify conserved amino acids that contain frequently occurring amino acid residues at particular positions in the aligned sequences, as shown in FIGS. 1-9. A dash in an aligned sequence represents a gap, i.e., a lack of an amino acid at that position. Identical amino acids or conserved amino acid substitutions among aligned sequences are identified by boxes. Each conserved region contains a sequence of contiguous amino acid residues.

[0080] Useful polypeptides can be constructed based on the conserved regions in FIG. 1, FIG. 2, FIG. 3, FIG. 4, FIG. 5, FIG. 6. FIG. 7, FIG. 8, or FIG. 9. Such a polypeptide includes the conserved regions arranged in the order depicted in a Figure from amino-terminal end to carboxy-terminal end and has at least 80% sequence identity to an amino acid sequence corresponding to any one of SEQ ID NO's: SEQ ID NO:80, SEQ ID NO:81, SEQ ID NO:82, SEQ ID NO:83, SEQ ID NO:84, SEQ ID NO:85, SEQ ID NO:86, SEQ ID NO:87, SEQ ID NO:91, SEQ ID NO:92, SEQ ID NO:93, SEQ ID NO:104 SEQ ID NO:108, SEQ ID NO:128, SEQ ID NO:129, SEQ ID NO:131, SEQ ID NO:95, SEQ ID NO:96, SEQ ID NO:205, SEQ ID NO:210, SEQ ID NO:213, SEQ ID NO:215, SEQ ID NO:218, SEQ ID NO:222, SEQ ID NO:223, SEQ ID NO:89, SEQ ID NO:159, SEQ ID NO:161, SEQ ID NO:165, SEQ ID NO:172, SEQ ID NO:178, SEQ ID NO:180, SEQ ID NO:182, SEQ ID NO:183, SEQ ID NO:144, SEQ ID NO:133, SEQ ID NO:137, SEQ ID NO:146, SEQ ID NO:152, SEQ ID NO:154, SEQ ID NO:156, SEQ ID NO:157, SEQ ID NO:110, SEQ ID NO:294, SEQ ID NO:296, SEQ ID NO:306, SEQ ID NO:320, SEQ ID NO:322, SEQ ID NO:326, SEQ ID NO:331, SEQ ID NO:98, SEQ ID NO:259, SEQ ID NO:261, SEQ ID NO:262, SEQ ID NO:269, SEQ ID NO:271, SEQ ID NO:273, SEQ ID NO:281, SEQ ID NO:283, SEQ ID NO:240, SEQ ID NO:226, SEQ ID NO:228, SEQ ID NO:229, SEQ ID NO:236, SEQ ID NO:238, SEQ ID NO:248, SEQ ID NO:250, SEQ ID NO:185, SEQ ID NO:187, SEQ ID NO:189, SEQ ID NO:191, SEQ ID NO:193, SEQ ID NO:195, SEQ ID NO:196, SEQ ID NO:198, SEQ ID NO:199, SEQ ID NO:200, SEQ ID NO:201, SEQ ID NO:202, SEQ ID NO:203, SEQ ID NO:163), SEQ ID NO:167, SEQ ID NO:169, SEQ ID NO:170, SEQ ID NO:174, SEQ ID NO:176, SEQ ID NO:135, SEQ ID NO:139), SEQ ID NO:141, SEQ ID NO:143, SEQ ID NO:148, SEQ ID NO:150, SEQ ID NO:341, SEQ ID NO:343, SEQ ID NO:345, SEQ ID NO:347, SEQ ID NO:349, SEQ ID NO:351, SEQ ID NO:353, SEQ ID NO:354, SEQ ID NO:356, SEQ ID NO:357, SEQ ID NO:358, SEQ ID NO:359, SEQ ID NO:360, SEQ ID NO:361, SEQ ID NO:363, SEQ ID NO:365, SEQ ID NO:367, SEQ ID NO:368, SEQ ID NO:369, SEQ ID NO:370, SEQ ID NO:371, SEQ ID NO:292, SEQ ID NO:298, SEQ ID NO:300, SEQ ID NO:302, SEQ ID NO:304, SEQ ID NO:305, SEQ ID NO:307, SEQ ID NO:308, SEQ ID NO:309, SEQ ID NO:310, SEQ ID NO:311, SEQ ID NO:312, SEQ ID NO:313, SEQ ID NO:315, SEQ ID NO:316, SEQ ID NO:318, SEQ ID NO:324, SEQ ID NO:328, SEQ ID NO:329, SEQ ID NO:330, SEQ ID NO:332, SEQ ID NO:333, SEQ ID NO:334, SEQ ID NO:335, SEQ ID NO:336, SEQ ID NO:337, SEQ ID NO:338, SEQ ID NO:339, SEQ ID 106, SEQ ID NO: 206, SEQ ID NO: 208, SEQ ID NO: 212, SEQ ID NO: 216, SEQ ID NO: 220, SEQ ID NO: 224, SEQ ID NO: 100, SEQ ID NO: 101, SEQ ID NO: 264, SEQ ID NO: 265, SEQ ID NO: 267, SEQ ID NO: 275, SEQ ID NO: 277, SEQ ID NO: 279, SEQ ID NO: 282, SEQ ID NO: 284, SEQ ID NO: 285, SEQ ID NO: 286, SEQ ID NO: 287, SEQ ID NO: 288, SEQ ID NO: 289, SEQ ID NO: 290, SEQ ID NO: 99, SEQ ID NO:102, SEQ ID NO:231, SEQ ID NO:232, SEQ ID NO:234, SEQ ID NO:242, SEQ ID NO:244, SEQ ID NO:246, SEQ ID NO:249, SEQ ID NO:251, SEQ ID NO:252, SEQ ID NO:253, SEQ ID NO:254, SEQ ID NO:255, SEQ ID NO:256, or SEQ ID NO:257. Such a polypeptide may also include zero, one, or more than one amino acid in positions marked by dashes. When no amino acids are present at positions marked by dashes, the length of such a polypeptide is the sum of the amino acid residues in all conserved regions. When amino acids are present at all positions marked by dashes, such a polypeptide has a length that is the sum of the amino acid residues in all conserved regions and all dashes.

[0081] In some embodiments, a carotenoid-modulating polypeptide is truncated at the amino- or carboxy-terminal end of a naturally occurring polypeptide. A truncated polypeptide may retain certain domains of the naturally occurring polypeptide while lacking others. Thus, length variants that are up to 5 amino acids shorter or longer typically exhibit the carotenoid-modulating activity of a truncated polypeptide. In some embodiments, a truncated polypeptide is a dominant negative polypeptide. SEQ ID NO: 89 sets forth the amino sequence of a carotenoid-modulating polypeptide that is truncated at the carboxyl end relative to the naturally occurring polypeptide. SEQ ID NO: 98 sets forth the amino sequence of a carotenoid-modulating polypeptide that is truncated at the carboxyl end relative to the naturally occurring polypeptide. Expression in a plant of such a truncated polypeptide confers a difference in the level of one or more carotenoids in a tissue of the plant as compared to the corresponding level in tissue of a control plant that does not comprise the truncation.

[0082] Conserved regions can be identified by homologous polypeptide sequence analysis as described above. The suitability of polypeptides for use as carotenoid-modulating polypeptides can be evaluated by functional complementation studies.

[0083] In some embodiments, useful polypeptides include those that fit a Hidden Markov Model based on the polypeptides set forth in any one of FIGS. 1-9. A Hidden Markov Model (HMM) is a statistical model of a consensus sequence for a group of homologous and/or orthologous polypeptides. See, Durbin et al., Biological Sequence Analysis Probabilistic Models of Proteins and Nucleic Acids, Cambridge University Press, Cambridge, UK (1998). An HMM is generated by the program HMMER 2.3.2 using the multiple sequence alignment of the group of homologous and/or orthologous sequences as input and the default program parameters. The multiple sequence alignment is generated by ProbCons (Do et al., Genome Res., 15(2):330-40 (2005)) version 1.11 using a set of default parameters: -c, —consistency REPS of 2; -ir, —iterative-refinement REPS of 100; -pre, —pre-training REPS of 0. ProbCons is a public domain software program provided by Stanford University.

[0084] The default parameters for building an HMM (hmmbuild) are as follows: the default “architecture prior” (archpri) used by MAP architecture construction is 0.85, and the default cutoff threshold (idlevel) used to determine the effective sequence number is 0.62. The HMMER 2.3.2 package was released Oct. 3, 2003 under a GNU general public license, and is available from various sources on the World Wide Web such as hmmer.janelia.org, hmmer.wustl.edu, and fr.com/hmmer232/. Hmmbuild outputs the model as a text file.

[0085] The HMM for a group of homologous and/or orthologous polypeptides can be used to determine the likelihood that a candidate carotenoid-modulating polypeptide sequence is a better fit to that particular HMM than to a null HMM generated using a group of sequences that are not structurally or functionally related. The likelihood that a candidate polypeptide sequence is a better fit to an HMM than to a null HMM is indicated by the HMM bit score, a number generated when the candidate sequence is fitted to the HMM profile using the HMMER hmmsearch program. The following default parameters are used when running hmmsearch: the default E-value cutoff (E) is 10.0, the default bit score cutoff (T) is negative infinity, the default number of sequences in a database (Z) is the real number of sequences in the database, the default E-value cutoff for the per-domain ranked hit list (domE) is infinity, and the default bit score cutoff for the per-domain ranked hit list (domT) is negative infinity. A high HMM bit score indicates a greater likelihood that the candidate sequence carries out one or more of the biochemical or physiological function(s) of the polypeptides used to generate the HMM. A high HMM bit score is at least 50, and often is higher.

[0086] The carotenoid modulating polypeptides described herein fit the indicated HMM with an HMM bit score greater than 50 (e.g., greater than 260, 280, 290, 300, 405, 410, 415, 420, 425, 430, 435, 440, 445, 450, 460, 470, 480, 490, 500, 520, 540, 560, 580, 600, 620, 640, 660, 680, 700, 720, 740, 760, or 780). In some embodiments, the HMM bit score of a carotenoid-modulating polypeptide described herein is about 80%, 81%, 82%, 83%, 84%, 85%, 86%, 87%, 88%, 89%, 90%, 91%, 92%, 93%, 94%, 95%, 96%, 97%, 98%, or 99% of the HMM bit score of a homologous and/or orthologous polypeptide provided in one of Tables 14-22. In some embodiments, a carotenoid modulating polypeptide fits the indicated HMM with an HMM bit score greater than 50, and has 80% or greater sequence identity (e.g., 80%, 85%, 90%, 95%, 97%, or 100% sequence identity) to an amino acid sequence shown in any one of FIGS. 1-9.

[0087] Polypeptides are shown in Table 14 that have HMM bit scores greater than 290 when fitted to an HMM generated from the amino acid sequences set forth in FIG. 1. Such polypeptides include Ceres Annot ID No. 1534144 (SEQ ID NO:185), Ceres Clone ID No. 463380 (SEQ ID NO: 195), and Public GI No. 1154352354 (SEQ ID NO: 200).

[0088] Polypeptides are shown in Table 15 that have HMM bit scores greater than 100 when fitted to an HMM generated from the amino acid sequences set forth in FIG. 2. Such polypeptides include Ceres Annot ID No. 1473516 (SEQ ID NO:345), Ceres clone ID No. 775387 (SEQ ID NO:365), and Public GI No. 12060388 (SEQ ID NO:368).

[0089] Polypeptides are shown in Table 16 that have HMM bit scores greater than 850 when fitted to an HMM generated from the amino acid sequences set forth in FIG. 3. Such polypeptides include Ceres Annot ID No. 1455046 (SEQ ID NO:106).

[0090] Polypeptides are shown in Table 17 that have HMM bit scores greater than 300 when fitted to an HMM generated from the amino acid sequences set forth in FIG. 4. Such polypeptides include Ceres Annot ID No. 1448769 (SEQ ID NO:208), Ceres clone ID No. 325641 (SEQ ID NO:222), and Public GI No. 115458786 (SEQ ID NO:224).

[0091] Polypeptides are shown in Table 18 that have HMM bit scores greater than 400 when fitted to an HMM generated from the amino acid sequences set forth in FIG. 5. Such polypeptides include SEQ ID NO: 163, SEQ ID NO: 169 and SEQ ID NO: 174.

[0092] Polypeptides are shown in Table 19 that have HMM bit scores greater than 600 when fitted to an HMM generated from the amino acid sequences set forth in FIG. 6. Such polypeptides include Ceres Annot ID No. 1511378 (SEQ ID NO:139), Ceres clone ID No. 942216 (SEQ ID NO:150), and Ceres Annot ID No. 1458137 (SEQ ID NO:141).

[0093] Polypeptides are shown in Table 20 that have HMM bit scores greater than 80 when fitted to an HMM generated from the amino acid sequences set forth in FIG. 7. Such polypeptides include Public GI No. 21264420 (SEQ ID NO:311), Ceres Clone ID No. 965028 (SEQ ID NO:318), and Ceres Clone ID No. 569593 (SEQ ID NO:328).

[0094] Polypeptides are shown in Table 21 that have HMM bit scores greater than 100 when fitted to an HMM generated from the amino acid sequences set forth in FIG. 8. Such polypeptides include SEQ ID NO:101, SEQ ID NO:264 and SEQ ID NO:285.

[0095] Polypeptides are shown in Table 22 that have HMM bit scores greater than 70 when fitted to an HMM generated from the amino acid sequences set forth in FIG. 9. Such polypeptides include Ceres clone ID No. 306269 (SEQ ID NO:244), Public GI No. 115483682 (SEQ ID NO:252), and Public GI No. 115443985 (SEQ ID NO:255).

### Nucleic Acids

[0096] The terms “nucleic acid” and “polynucleotide” are used interchangeably herein, and refer to both RNA and DNA, including cDNA, genomic DNA, synthetic DNA, and DNA (or RNA) containing nucleic acid analogs. Polynucleotides can have any three-dimensional structure. A nucleic acid can be double-stranded or single-stranded (i.e., a sense strand or an antisense strand). Non-limiting examples of polynucleotides include genes, gene fragments, exons, introns, messenger RNA (mRNA), transfer RNA, ribosomal RNA, siRNA, micro-RNA, ribozymes, cDNA, recombinant polynucleotides, branched polynucleotides, plasmids, vectors, isolated DNA of any sequence, isolated RNA of any sequence, nucleic acid probes, and primers, as well as nucleic acid analogs.

[0097] An “isolated” nucleic acid can be, for example, a naturally-occurring DNA molecule, provided one of the nucleic acid sequences normally found immediately flanking that DNA molecule in a naturally-occurring genome is removed or absent. Thus, an isolated nucleic acid includes, without limitation, a DNA molecule that exists as a separate molecule, independent of other sequences (e.g., a chemically synthesized nucleic acid, or a cDNA or genomic DNA fragment produced by the polymerase chain reaction (PCR) or restriction endonuclease treatment). An isolated nucleic acid also refers to a DNA molecule that is incorporated into a vector, an autonomously replicating plasmid, a virus, or into the genomic DNA of a prokaryote or eukaryote. In addition, an isolated nucleic acid can include an engineered nucleic acid such as a DNA molecule that is part of a hybrid or fusion nucleic acid. A nucleic acid existing among hundreds to millions of other nucleic acids within, for example, cDNA libraries or genomic libraries, or gel slices containing a genomic DNA restriction digest, is not to be considered an isolated nucleic acid.

[0098] Isolated nucleic acid molecules can be produced by standard techniques. For example, polymerase chain reaction (PCR) techniques can be used to obtain an isolated nucleic acid containing a nucleotide sequence described herein. PCR can be used to amplify specific sequences from DNA as well as RNA, including sequences from total genomic DNA or total cellular RNA. Various PCR methods are described, for example, in PCR Primer: A Laboratory Manual, Dieffenbach and Dveksler, eds., Cold Spring Harbor Laboratory Press, 1995. Generally, sequence information from the ends of the region of interest or beyond is employed to design oligonucleotide primers that are identical or similar in sequence to opposite strands of the template to be amplified. Various PCR strategies also are available by which site-specific nucleotide sequence modifications can be introduced into a template nucleic acid. Isolated nucleic acids also can be chemically synthesized, either as a single nucleic acid molecule (e.g., using automated DNA synthesis in the 3′ to 5′ direction using phosphoramidite technology) or as a series of oligonucleotides. For example, one or more pairs of long oligonucleotides (e.g., >100 nucleotides) can be synthesized that contain the desired sequence, with each pair containing a short segment of complementarity (e.g., about 15 nucleotides) such that a duplex is formed when the oligonucleotide pair is annealed. DNA polymerase is used to extend the oligonucleotides, resulting in a single, double-stranded nucleic acid molecule per oligonucleotide pair, which then can be ligated into a vector. Isolated nucleic acids of the invention also can be obtained by mutagenesis of, e.g., a naturally occurring DNA.

[0099] As used herein, the term “percent sequence identity” refers to the degree of identity between any given query sequence and a subject sequence. A subject sequence typically has a length that is more than 80 percent, e.g., more than 82, 85, 87, 89, 90, 93, 95, 97, 99, 100, 105, 110, 115, or 120 percent, of the length of the query sequence. A query nucleic acid or amino acid sequence is aligned to one or more subject nucleic acid or amino acid sequences using the computer program ClustalW (version 1.83, default parameters), which allows alignments of nucleic acid or protein sequences to be carried out across their entire length (global alignment). Chema et al., Nucleic Acids Res., 31(13):3497-500 (2003).

[0100] ClustalW calculates the best match between a query and one or more subject sequences, and aligns them so that identities, similarities and differences can be determined. Gaps of one or more residues can be inserted into a query sequence, a subject sequence, or both, to maximize sequence alignments. For fast pairwise alignment of nucleic acid sequences, the following default parameters are used: word size: 2; window size: 4; scoring method: percentage; number of top diagonals: 4; and gap penalty: 5. For multiple alignment of nucleic acid sequences, the following parameters are used: gap opening penalty: 10.0; gap extension penalty: 5.0; and weight transitions: yes. For fast pairwise alignment of protein sequences, the following parameters are used: word size: 1; window size: 5; scoring method: percentage; number of top diagonals: 5; gap penalty: 3. For multiple alignment of protein sequences, the following parameters are used: weight matrix: blosum; gap opening penalty: 10.0; gap extension penalty: 0.05; hydrophilic gaps: on; hydrophilic residues: Gly, Pro, Ser, Asn, Asp, Gln, Glu, Arg, and Lys; residue-specific gap penalties: on. The output is a sequence alignment that reflects the relationship between sequences. ClustalW can be run, for example, at the Baylor College of Medicine Search Launcher site (searchlauncher.bcm.tmc.edu/multi-align/multi-align.html) and at the European Bioinformatics Institute site on the World Wide Web (ebi.ac.uk/clustalw).

[0101] To determine a percent identity between a query sequence and a subject sequence, ClustalW divides the number of identities in the best alignment by the number of residues compared (gap positions are excluded), and multiplies the result by 100. The output is the percent identity of the subject sequence with respect to the query sequence. It is noted that the percent identity value can be rounded to the nearest tenth. For example, 78.11, 78.12, 78.13, and 78.14 are rounded down to 78.1, while 78.15, 78.16, 78.17, 78.18, and 78.19 are rounded up to 78.2.

[0102] The term “exogenous” with respect to a nucleic acid indicates that the nucleic acid is part of a recombinant nucleic acid construct, or is not in its natural environment. For example, an exogenous nucleic acid can be a sequence from one species introduced into another species, i.e., a heterologous nucleic acid. Typically, such an exogenous nucleic acid is introduced into the other species via a recombinant nucleic acid construct. An exogenous nucleic acid can also be a sequence that is native to an organism and that has been reintroduced into cells of that organism. An exogenous nucleic acid that includes a native sequence can often be distinguished from the naturally occurring sequence by the presence of non-natural sequences linked to the exogenous nucleic acid, e.g., non-native regulatory sequences flanking a native sequence in a recombinant nucleic acid construct. In addition, stably transformed exogenous nucleic acids typically are integrated at positions other than the position where the native sequence is found. It will be appreciated that an exogenous nucleic acid may have been introduced into a progenitor and not into the cell under consideration. For example, a transgenic plant containing an exogenous nucleic acid can be the progeny of a cross between a stably transformed plant and a non-transgenic plant. Such progeny are considered to contain the exogenous nucleic acid.

[0103] Recombinant constructs can be used to transform plants or plant cells in order to modulate carotenoid levels. A recombinant nucleic acid construct can comprise a nucleic acid encoding a carotenoid-modulating polypeptide as described herein, operably linked to a regulatory region suitable for expressing the carotenoid-modulating polypeptide in the plant or cell. Thus, a nucleic acid can comprise a coding sequence that encodes any of the carotenoid-modulating polypeptides as set forth in SEQ ID NOs: 80-87, SEQ ID NO: 89, SEQ ID NOs: 91-93, SEQ ID NOs: 95-96, SEQ ID NOs: 98-102, SEQ ID NO: 104, SEQ ID NO:106, SEQ ID NO:108, SEQ ID NO: 110, SEQ ID NOs: 128-129, SEQ ID NO: 131; SEQ ID NO: 133, SEQ ID NO:135, SEQ ID NO:137, SEQ ID NO:139, SEQ ID NO:141, SEQ ID NOs:143-144, SEQ ID NO:146, SEQ ID NO:148, SEQ ID NO:150, SEQ ID NO:152, SEQ ID NO:154, SEQ ID NO:156, SEQ ID NO:157; SEQ ID NO: 159, SEQ ID NO: 161, SEQ ID NO: 163, SEQ ID NO: 165, SEQ ID NO: 167, SEQ ID NOs: 169-170, SEQ ID NO: 172, SEQ ID NO: 174, SEQ ID NO: 176, SEQ ID NO: 178, SEQ ID NO: SEQ ID NO: 180, SEQ ID NO: 182, SEQ ID NO: 183, SEQ ID NO: 185, SEQ ID NO: 187, SEQ ID NO: 189, SEQ ID NO: 191, SEQ ID NO: 193, SEQ ID NOs: 195-196, SEQ ID NOs: 199-203, SEQ ID NO: 205, SEQ ID NO: 206, SEQ ID NO: 208, SEQ ID NO: 210, SEQ ID NO: 212, SEQ ID NO: 213, SEQ ID NO: 215, SEQ ID NO: 216, SEQ ID NO: 218, SEQ ID NO: 220, SEQ ID NO: 222, SEQ ID NO: 223, SEQ ID NO: 224, SEQ ID NO:226, SEQ ID NO:228, SEQ ID NO:229, SEQ ID NO:231, SEQ ID NO:232, SEQ ID NO:234, SEQ ID NO:236, SEQ ID NO:238, SEQ ID NO:240, SEQ ID NO:242, SEQ ID NO:244, SEQ ID NO:246, SEQ ID NOs:248-257, SEQ ID NO:259, SEQ ID NO:261, SEQ ID NO:262, SEQ ID NO:264, SEQ ID NO:265, SEQ ID NO:267, SEQ ID NO:269, SEQ ID NO:271, SEQ ID NO:273, SEQ ID NO:275, SEQ ID NO:277, SEQ ID NO:279, SEQ ID NOs:281-290, SEQ ID NO:292, SEQ ID NO:294, SEQ ID NO:296, SEQ ID NO:298, SEQ ID NO:300, SEQ ID NO:302, SEQ ID NOs:304-313, SEQ ID NO:315, SEQ ID NO:316, SEQ ID NO:318, SEQ ID NO:320, SEQ ID NO:322, SEQ ID NO:324, SEQ ID NO:326, SEQ ID NOs:328-339, SEQ ID NO:341, SEQ ID NO:343, SEQ ID NO:345, SEQ ID NO:347, SEQ ID NO:349, SEQ ID NO:351, SEQ ID NO:353, SEQ ID NO:354, SEQ ID NOs:356-361, SEQ ID NO:363, SEQ ID NO:365, or SEQ ID NOs:367-371.

[0104] Examples of nucleic acids encoding carotenoid-modulating polypeptides are set forth in SEQ ID NO: 94, SEQ ID NO: 97, SEQ ID NO: 103, SEQ ID NO: 105, SEQ ID NO: 107, SEQ ID NO: 109, SEQ ID NO: 127, SEQ ID NO: 130, SEQ ID NO: 132, SEQ ID NO: 134, SEQ ID NO: 136, SEQ ID NO: 138, SEQ ID NO: 140, SEQ ID NO: 142, SEQ ID NO: 145, SEQ ID NO: 147, SEQ ID NO: 149, SEQ ID NO: 151, SEQ ID NO: 153, SEQ ID NO: 155, SEQ ID NO: 158, SEQ ID NO: 160, SEQ ID NO: 162, SEQ ID NO: 164, SEQ ID NO: 166, SEQ ID NO: 168, SEQ ID NO: 171, SEQ ID NO: 173, SEQ ID NO: 175, SEQ ID NO: 177, SEQ ID NO: 179, SEQ ID NO: 181, SEQ ID NO: 184, SEQ ID NO: 186, SEQ ID NO: 188, SEQ ID NO: 190, SEQ ID NO: 192, SEQ ID NO: 194, SEQ ID NO: 197, SEQ ID NO: 204, SEQ ID NO: 207, SEQ ID NO: 209, SEQ ID NO: 211, SEQ ID NO: 214, SEQ ID NO: 217, SEQ ID NO: 219, SEQ ID NO: 221, SEQ ID NO: 225, SEQ ID NO: 227, SEQ ID NO: 230, SEQ ID NO: 233, SEQ ID NO: 235, SEQ ID NO: 237, SEQ ID NO: 239, SEQ ID NO: 241, SEQ ID NO: 243, SEQ ID NO: 245, SEQ ID NO: 247, SEQ ID NO: 258, SEQ ID NO: 260, SEQ ID NO: 263, SEQ ID NO: 266, SEQ ID NO: 268, SEQ ID NO: 270, SEQ ID NO: 272, SEQ ID NO: 274, SEQ ID NO: 276, SEQ ID NO: 278, SEQ ID NO: 280, SEQ ID NO: 291, SEQ ID NO: 293, SEQ ID NO: 295, SEQ ID NO: 297, SEQ ID NO: 299, SEQ ID NO: 301, SEQ ID NO: 303, SEQ ID NO: 314, SEQ ID NO: 317, SEQ ID NO: 319, SEQ ID NO: 321, SEQ ID NO: 323, SEQ ID NO: 325, SEQ ID NO: 327, SEQ ID NO: 340, SEQ ID NO: 342, SEQ ID NO: 344, SEQ ID NO: 346, SEQ ID NO: 348, SEQ ID NO: 350, SEQ ID NO: 352, SEQ ID NO: 355, SEQ ID NO: 362, SEQ ID NO: 364, SEQ ID NO: 366 and SEQ ID NOs: 372-379.

[0105] In some cases, a recombinant nucleic acid construct can include a nucleic acid comprising less than the full-length coding sequence of a carotenoid-modulating polypeptide. For example, a recombinant nucleic acid construct can comprise a carotenoid-modulating nucleic acid having the nucleotide sequence set forth in SEQ ID NO: 89 or SEQ ID NO: 98. In some cases, a recombinant nucleic acid construct can include a nucleic acid comprising a coding sequence, a gene, or a fragment of a coding sequence or gene in an antisense orientation so that the antisense strand of RNA is transcribed.

[0106] It will be appreciated that a number of nucleic acids can encode a polypeptide having a particular amino acid sequence. The degeneracy of the genetic code is well known to the art; i.e., for many amino acids, there is more than one nucleotide triplet that serves as the codon for the amino acid. For example, codons in the coding sequence for a given carotenoid-modulating polypeptide can be modified such that optimal expression in a particular plant species is obtained, using appropriate codon bias tables for that species.

[0107] Vectors containing nucleic acids such as those described herein also are provided. A “vector” is a replicon, such as a plasmid, phage, or cosmid, into which another DNA segment may be inserted so as to bring about the replication of the inserted segment. Generally, a vector is capable of replication when associated with the proper control elements. Suitable vector backbones include, for example, those routinely used in the art such as plasmids, viruses, artificial chromosomes, BACs, YACs, or PACs. The term “vector” includes cloning and expression vectors, as well as viral vectors and integrating vectors. An “expression vector” is a vector that includes a regulatory region. Suitable expression vectors include, without limitation, plasmids and viral vectors derived from, for example, bacteriophage, baculoviruses, and retroviruses. Numerous vectors and expression systems are commercially available from such corporations as Novagen (Madison, Wis.), Clontech (Palo Alto, Calif.), Stratagene (La Jolla, Calif.), and Invitrogen/Life Technologies (Carlsbad, Calif.).

[0108] The vectors provided herein also can include, for example, origins of replication, scaffold attachment regions (SARs), and/or markers. A marker gene can confer a selectable phenotype on a plant cell. For example, a marker can confer biocide resistance, such as resistance to an antibiotic (e.g., kanamycin, G418, bleomycin, or hygromycin), or an herbicide (e.g., chlorosulfuron or phosphinothricin). In addition, an expression vector can include a tag sequence designed to facilitate manipulation or detection (e.g., purification or localization) of the expressed polypeptide. Tag sequences, such as green fluorescent protein (GFP), glutathione S-transferase (GST), polyhistidine, c-myc, hemagglutinin, or Flag™ tag (Kodak, New Haven, Conn.) sequences typically are expressed as a fusion with the encoded polypeptide. Such tags can be inserted anywhere within the polypeptide, including at either the carboxyl or amino terminus.

### Regulatory Regions

[0109] The term “regulatory region” refers to nucleotide sequences that influence transcription or translation initiation and rate, and stability and/or mobility of a transcription or translation product. Regulatory regions include, without limitation, promoter sequences, enhancer sequences, response elements, protein recognition sites, inducible elements, protein binding sequences, 5′ and 3′ untranslated regions (UTRs), transcriptional start sites, termination sequences, polyadenylation sequences, and introns.

[0110] As used herein, the term “operably linked” refers to positioning of a regulatory region and a sequence to be transcribed in a nucleic acid so as to influence transcription or translation of such a sequence. For example, to bring a coding sequence under the control of a promoter, the translation initiation site of the translational reading frame of the polypeptide is typically positioned between one and about fifty nucleotides downstream of the promoter. A promoter can, however, be positioned as much as about 5,000 nucleotides upstream of the translation initiation site or about 2,000 nucleotides upstream of the transcription start site. A promoter typically comprises at least a core (basal) promoter. A promoter also may include at least one control element, such as an enhancer sequence, an upstream element or an upstream activation region (UAR). For example, a suitable enhancer is a cis-regulatory element (−212 to −154) from the upstream region of the octopine synthase (ocs) gene. Fromm et al., The Plant Cell, 1:977-984 (1989). The choice of promoters to be included depends upon several factors, including, but not limited to, efficiency, selectability, inducibility, desired expression level, and cell- or tissue-preferential expression. It is a routine matter for one of skill in the art to modulate the expression of a coding sequence by appropriately selecting and positioning promoters and other regulatory regions relative to the coding sequence.

[0111] Some suitable promoters initiate transcription only, or predominantly, in certain cell types. For example, a promoter that is active predominantly in a reproductive tissue (e.g., fruit, ovule, pollen, pistils, female gametophyte, egg cell, central cell, nucellus, suspensor, synergid cell, flowers, embryonic tissue, embryo sac, embryo, zygote, endosperm, integument, or seed coat) can be used. Thus, as used herein a cell type- or tissue-preferential promoter is one that drives expression preferentially in the target tissue, but may also lead to some expression in other cell types or tissues as well. Methods for identifying and characterizing promoter regions in plant genomic DNA include, for example, those described in the following references: Jordano et al., Plant Cell, 1:855-866 (1989); Bustos et al., Plant Cell, 1:839-854 (1989); Green et al., EMBO J., 7:4035-4044 (1988); Meier et al., Plant Cell, 3:309-316 (1991); and Zhang et al., Plant Physiology, 110:1069-1079 (1996).

[0112] Examples of various classes of promoters are described below. Some of the promoters indicated below as well as additional promoters are described in more detail in U.S. Patent Application Ser. Nos. 60/505,689; 60/518,075; 60/544,771; 60/558,869; 60/583,691; 60/583,609; 60/612,891; 60/619,181; 60/637,140; 60/757,544; 60/776,307; 10/950,321; 10/957,569; 11/058,689; 11/097,589; 11/172,703; 11/208,308; 11/233,726; 11/274,890; 11/360,017; 11/408,791; 11/414,142 PCT/US05/011105; PCT/US05/034308; PCT/US05/034343; PCT/US06/038236; PCT/US05/23639; PCT/US06/040572 and PCT/US07/62762. Nucleotide sequences of promoters are set forth in SEQ ID NOs: 1-78 and 111-126. It will be appreciated that a promoter may meet criteria for one classification based on its activity in one plant species, and yet meet criteria for a different classification based on its activity in another plant species.

[0113] Broadly Expressing Promoters

[0114] A promoter can be said to be “broadly expressing” when it promotes transcription in many, but not necessarily all, plant tissues. For example, a broadly expressing promoter can promote transcription of an operably linked sequence in one or more of the shoot, shoot tip (apex), and leaves, but weakly or not at all in tissues such as roots or stems. As another example, a broadly expressing promoter can promote transcription of an operably linked sequence in one or more of the stem, shoot, shoot tip (apex), and leaves, but can promote transcription weakly or not at all in tissues such as reproductive tissues of flowers and developing seeds. Non-limiting examples of broadly expressing promoters that can be included in the nucleic acid constructs provided herein include the p326 (SEQ ID NO: 76), YP0144 (SEQ ID NO: 55), YP0190 (SEQ ID NO: 59), p13879 (SEQ ID NO: 75), YP0050 (SEQ ID NO: 35), p32449 (SEQ ID NO: 77), 21876 (SEQ ID NO: 1), YP0158 (SEQ ID NO: 57), YP0214 (SEQ ID NO: 61), YP0380 (SEQ ID NO: 70), PT0848 (SEQ ID NO: 26), and PT0633 (SEQ ID NO: 7) promoters. Additional examples include the cauliflower mosaic virus (CaMV) 35S promoter, the mannopine synthase (MAS) promoter, the 1′ or 2′ promoters derived from T-DNA of Agrobacterium tumefaciens, the figwort mosaic virus 34S promoter, actin promoters such as the rice actin promoter, and ubiquitin promoters such as the maize ubiquitin-1 promoter. In some cases, the CaMV 35S promoter is excluded from the category of broadly expressing promoters.

[0115] Root Promoters

[0116] Root-active promoters confer transcription in root tissue, e.g., root endodermis, root epidermis, or root vascular tissues. In some embodiments, root-active promoters are root-preferential promoters, i.e., confer transcription only or predominantly in root tissue. Root-preferential promoters include the YP0128 (SEQ ID NO: 52), YP0275 (SEQ ID NO: 63), PT0625 (SEQ ID NO: 6), PT0660 (SEQ ID NO: 9), PT0683 (SEQ ID NO: 14), and PT0758 (SEQ ID NO: 22) promoters. Other root-preferential promoters include the PT0613 (SEQ ID NO: 5), PT0672 (SEQ ID NO: 11), PT0688 (SEQ ID NO: 15), and PT0837 (SEQ ID NO: 24) promoters, which drive transcription primarily in root tissue and to a lesser extent in ovules and/or seeds. Other examples of root-preferential promoters include the root-specific subdomains of the CaMV 35S promoter (Lam et al., Proc. Natl. Acad. Sci. USA, 86:7890-7894 (1989)), root cell specific promoters reported by Conkling et al., Plant Physiol., 93:1203-1211 (1990), and the tobacco RD2 promoter.

[0117] Maturing Endosperm Promoters

[0118] In some embodiments, promoters that drive transcription in maturing endosperm can be useful. Transcription from a maturing endosperm promoter typically begins after fertilization and occurs primarily in endosperm tissue during seed development and is typically highest during the cellularization phase. Most suitable are promoters that are active predominantly in maturing endosperm, although promoters that are also active in other tissues can sometimes be used. Non-limiting examples of maturing endosperm promoters that can be included in the nucleic acid constructs provided herein include the napin promoter, the Arcelin-5 promoter, the phaseolin promoter (Bustos et al., Plant Cell, 1(9):839-853 (1989)), the soybean trypsin inhibitor promoter (Riggs et al., Plant Cell, 1(6):609-621 (1989)), the ACP promoter (Baerson et al., Plant Mol. Biol., 22(2):255-267 (1993)), the stearoyl-ACP desaturase promoter (Slocombe et al., Plant Physiol., 104(4):167-176 (1994)), the soybean a′ subunit of β-conglycinin promoter (Chen et al., Proc. Natl. Acad. Sci. USA, 83:8560-8564 (1986)), the oleosin promoter (Hong et al., Plant Mol. Biol., 34(3):549-555 (1997)), and zein promoters, such as the 15 kD zein promoter, the 16 kD zein promoter, 19 kD zein promoter, 22 kD zein promoter and 27 kD zein promoter. Also suitable are the Osgt-1 promoter from the rice glutelin-1 gene (Zheng et al., Mol. Cell. Biol., 13:5829-5842 (1993)), the beta-amylase promoter, and the barley hordein promoter. Other maturing endosperm promoters include the YP0092 (SEQ ID NO: 38), PT0676 (SEQ ID NO: 12), and PT0708 (SEQ ID NO: 17) promoters.

[0119] Ovary Tissue Promoters

[0120] Promoters that are active in ovary tissues such as the ovule wall and mesocarp can also be useful, e.g., a polygalacturonidase promoter, the banana TRX promoter, and the melon actin promoter. Examples of promoters that are active primarily in ovules include YP0007 (SEQ ID NO: 30), YP0111 (SEQ ID NO: 46), YP0092 (SEQ ID NO: 38), YP0103 (SEQ ID NO: 43), YP0028 (SEQ ID NO: 33), YP0121 (SEQ ID NO: 51), YP0008 (SEQ ID NO: 31), YP0039 (SEQ ID NO: 34), YP0115 (SEQ ID NO: 47), YP0119 (SEQ ID NO: 49), YP0120 (SEQ ID NO: 50), YP0374 (SEQ ID NO: 68), YP0396 (SEQ ID NO: 74), and PT0623 (SEQ ID NO: 126).

[0121] Embryo Sac/Early Endosperm Promoters

[0122] To achieve expression in embryo sac/early endosperm, regulatory regions can be used that are active in polar nuclei and/or the central cell, or in precursors to polar nuclei, but not in egg cells or precursors to egg cells. Most suitable are promoters that drive expression only or predominantly in polar nuclei or precursors thereto and/or the central cell. A pattern of transcription that extends from polar nuclei into early endosperm development can also be found with embryo sac/early endosperm-preferential promoters, although transcription typically decreases significantly in later endosperm development during and after the cellularization phase. Expression in the zygote or developing embryo typically is not present with embryo sac/early endosperm promoters.

[0123] Promoters that may be suitable include those derived from the following genes: Arabidopsis viviparous-1 (see, GenBank No. U93215); Arabidopsis atmycl (see, Urao (1996) Plant Mol. Biol., 32:571-57; Conceicao (1994) Plant, 5:493-505); Arabidopsis FIE (GenBank No. AF129516); Arabidopsis MEA; Arabidopsis FIS2 (GenBank No. AF096096); and FIE 1.1 (U.S. Pat. No. 6,906,244). Other promoters that may be suitable include those derived from the following genes: maize MAC1 (see, Sheridan (1996) Genetics, 142:1009-1020); maize Cat3 (see, GenBank No. L05934; Abler (1993) Plant Mol. Biol., 22:10131-1038). Other promoters include the following Arabidopsis promoters: YP0039 (SEQ ID NO: 34), YP0101 (SEQ ID NO: 41), YP0102 (SEQ ID NO: 42), YP0110 (SEQ ID NO: 45), YP0117 (SEQ ID NO: 48), YP0119 (SEQ ID NO: 49), YP0137 (SEQ ID NO: 53), DME, YP0285 (SEQ ID NO: 64), and YP0212 (SEQ ID NO: 60). Other promoters that may be useful include the following rice promoters: p530c10 (SEQ ID NO: 111), pOsFIE2-2 (SEQ ID NO: 112), pOsMEA (SEQ ID NO: 113), pOsYp102 (SEQ ID NO: 114), and pOsYp285 (SEQ ID NO: 115).

[0124] Embryo Promoters

[0125] Regulatory regions that preferentially drive transcription in zygotic cells following fertilization can provide embryo-preferential expression. Most suitable are promoters that preferentially drive transcription in early stage embryos prior to the heart stage, but expression in late stage and maturing embryos is also suitable. Embryo-preferential promoters include the barley lipid transfer protein (Ltpl) promoter (Plant Cell Rep (2001) 20:647-654), YP0097 (SEQ ID NO: 40), YP0107 (SEQ ID NO: 44), YP0088 (SEQ ID NO: 37), YP0143 (SEQ ID NO: 54), YP0156 (SEQ ID NO: 56), PT0650 (SEQ ID NO: 8), PT0695 (SEQ ID NO: 16), PT0723 (SEQ ID NO: 19), PT0838 (SEQ ID NO: 25), PT0879 (SEQ ID NO: 28), and PT0740 (SEQ ID NO: 20).

[0126] Photosynthetic Tissue Promoters

[0127] Promoters active in photosynthetic tissue confer transcription in green tissues such as leaves and stems. Most suitable are promoters that drive expression only or predominantly in such tissues. Examples of such promoters include the ribulose-1,5-bisphosphate carboxylase (RbcS) promoters such as the RbcS promoter from eastern larch (Larix laricina), the pine cab6 promoter (Yamamoto et al., Plant Cell Physiol., 35:773-778 (1994)), the Cab-1 promoter from wheat (Fejes et al., Plant Mol. Biol., 15:921-932 (1990)), the CAB-1 promoter from spinach (Lubberstedt et al., Plant Physiol., 104:997-1006 (1994)), the cab1R promoter from rice (Luan et al., Plant Cell, 4:971-981 (1992)), the pyruvate orthophosphate dikinase (PPDK) promoter from corn (Matsuoka et al., Proc. Natl. Acad. Sci. USA, 90:9586-9590 (1993)), the tobacco Lhcb1*2 promoter (Cerdan et al., Plant Mol. Biol., 33:245-255 (1997)), the Arabidopsis thaliana SUC2 sucrose-H+ symporter promoter (Truernit et al., Planta, 196:564-570 (1995)), and thylakoid membrane protein promoters from spinach (psaD, psaF, psaE, PC, FNR, atpC, atpD, cab, rbcS). Other photosynthetic tissue promoters include PT0535 (SEQ ID NO: 3), PT0668 (SEQ ID NO: 2), PT0886 (SEQ ID NO: 29), YP0144 (SEQ ID NO: 55), YP0380 (SEQ ID NO: 70), and PT0585 (SEQ ID NO: 4).

[0128] Vascular Tissue Promoters

[0129] Examples of promoters that have high or preferential activity in vascular bundles include YP0087 (SEQ ID NO: 118), YP0093 (SEQ ID NO: 119), YP0108 (SEQ ID NO: 120), YP0022 (SEQ ID NO: 141), and YP0080 (SEQ ID NO: 122). Other vascular tissue-preferential promoters include the glycine-rich cell wall protein GRP 1.8 promoter (Keller and Baumgartner, Plant Cell, 3(10):1051-1061 (1991)), the Commelina yellow mottle virus (CoYMV) promoter (Medberry et al., Plant Cell, 4(2):185-192 (1992)), and the rice tungro bacilliform virus (RTBV) promoter (Dai et al., Proc. Natl. Acad. Sci. USA, 101(2):687-692 (2004)). Promoters having preferential activity in sieve, laticifer, and/or companion cells are also considered vascular tissue promoters.

[0130] Inducible Promoters

[0131] Inducible promoters confer transcription in response to external stimuli such as chemical agents or environmental stimuli. For example, inducible promoters can confer transcription in response to hormones such as gibberellic acid or ethylene, or in response to light or drought. Examples of drought-inducible promoters include YP0380 (SEQ ID NO: 70), PT0848 (SEQ ID NO: 26), YP0381 (SEQ ID NO: 71), YP0337 (SEQ ID NO: 66), PT0633 (SEQ ID NO: 7), YP0374 (SEQ ID NO: 68), PT0710 (SEQ ID NO: 18), YP0356 (SEQ ID NO: 67), YP0385 (SEQ ID NO: 73), YP0396 (SEQ ID NO: 74), YP0388 (SEQ ID NO: 124), YP0384 (SEQ ID NO: 72), PT0688 (SEQ ID NO: 15), YP0286 (SEQ ID NO: 65), YP0377 (SEQ ID NO: 69), PD1367 (SEQ ID NO: 78), PD0901 (SEQ ID NO: 125), and PD0898. Nitrogen-inducible promoters include PT0863 (SEQ ID NO: 27), PT0829 (SEQ ID NO: 23), PT0665 (SEQ ID NO:10), and PT0886 (SEQ ID NO:29). Examples of shade-inducible promoters include PRO924 (SEQ ID NO: 123), and PT0678 (SEQ ID NO: 13).

[0132] Basal Promoters

[0133] A basal promoter is the minimal sequence necessary for assembly of a transcription complex required for transcription initiation. Basal promoters frequently include a “TATA box” element that may be located between about 15 and about 35 nucleotides upstream from the site of transcription initiation. Basal promoters also may include a “CCAAT box” element (typically the sequence CCAAT) and/or a GGGCG sequence, which can be located between about 40 and about 200 nucleotides, typically about 60 to about 120 nucleotides, upstream from the transcription start site.

[0134] Other Promoters

[0135] Other classes of promoters include, but are not limited to, leaf-preferential, stem/shoot-preferential, callus-preferential, guard cell-preferential such as PT0678 (SEQ ID NO: 13), tuber-preferential, parenchyma cell-preferential, and senescence-preferential promoters. Promoters designated YP0086 (SEQ ID NO: 36), YP0188 (SEQ ID NO: 58), YP0263 (SEQ ID NO: 62), PT0758 (SEQ ID NO: 22), PT0743 (SEQ ID NO: 21), PT0829 (SEQ ID NO: 23), YP0119 (SEQ ID NO: 32), and YP0096 (SEQ ID NO: 39), as described in the above-referenced patent applications, may also be useful.

[0136] Other Regulatory Regions

[0137] A 5′ untranslated region (UTR) can be included in nucleic acid constructs described herein. A 5′ UTR is transcribed, but is not translated, and lies between the start site of the transcript and the translation initiation codon and may include the +1 nucleotide. A 3′ UTR can be positioned between the translation termination codon and the end of the transcript. UTRs can have particular functions such as increasing mRNA stability or attenuating translation. Examples of 3′ UTRs include, but are not limited to, polyadenylation signals and transcription termination sequences, e.g., a nopaline synthase termination sequence.

[0138] It will be understood that more than one regulatory region may be present in a recombinant polynucleotide, e.g., introns, enhancers, upstream activation regions, transcription terminators, and inducible elements. Thus, more than one regulatory region can be operably linked to the sequence of a polynucleotide encoding a carotenoid-modulating polypeptide.

[0139] Regulatory regions, such as promoters for endogenous genes, can be obtained by chemical synthesis or by subcloning from a genomic DNA that includes such a regulatory region. A nucleic acid comprising such a regulatory region can also include flanking sequences that contain restriction enzyme sites that facilitate subsequent manipulation.

### Transgenic Plants and Plant Cells

[0140] The invention also features transgenic plant cells and plants comprising at least one recombinant nucleic acid construct described herein. A plant or plant cell can be transformed by having a construct integrated into its genome, i.e., can be stably transformed. Stably transformed cells typically retain the introduced nucleic acid with each cell division. A plant or plant cell can also be transiently transformed such that the construct is not integrated into its genome. Transiently transformed cells typically lose all or some portion of the introduced nucleic acid construct with each cell division such that the introduced nucleic acid cannot be detected in daughter cells after a sufficient number of cell divisions. Both transiently transformed and stably transformed transgenic plants and plant cells can be useful in the methods described herein.

[0141] Transgenic plant cells used in methods described herein can constitute part or all of a whole plant. Such plants can be grown in a manner suitable for the species under consideration, either in a growth chamber, a greenhouse, or in a field. Transgenic plants can be bred as desired for a particular purpose, e.g., to introduce a recombinant nucleic acid into other lines, to transfer a recombinant nucleic acid to other species, or for further selection of other desirable traits. Alternatively, transgenic plants can be propagated vegetatively for those species amenable to such techniques. As used herein, a transgenic plant also refers to progeny of an initial transgenic plant. Progeny includes descendants of a particular plant or plant line. Progeny of an instant plant include seeds formed on F₁, F₂, F₃, F₄, F₅, F₆ and subsequent generation plants, or seeds formed on BC₁, BC₂, BC₃, and subsequent generation plants, or seeds formed on F₁BC₁, F₃BC₂, F₁BC₃, and subsequent generation plants. The designation F₁ refers to the progeny of a cross between two parents that are genetically distinct. The designations F₂, F₃, F₄, F₅ and F₆ refer to subsequent generations of self- or sib-pollinated progeny of an F₁ plant. Seeds produced by a transgenic plant can be grown and then selfed (or outcrossed and selfed) to obtain seeds homozygous for the nucleic acid construct.

[0142] Transgenic plants can be grown in suspension culture, or tissue or organ culture. For the purposes of this invention, solid and/or liquid tissue culture techniques can be used. When using solid medium, transgenic plant cells can be placed directly onto the medium or can be placed onto a filter that is then placed in contact with the medium. When using liquid medium, transgenic plant cells can be placed onto a flotation device, e.g., a porous membrane that contacts the liquid medium. Solid medium typically is made from liquid medium by adding agar. For example, a solid medium can be Murashige and Skoog (MS) medium containing agar and a suitable concentration of an auxin, e.g., 2,4-dichlorophenoxyacetic acid (2,4-D), and a suitable concentration of a cytokinin, e.g., kinetin.

[0143] When transiently transformed plant cells are used, a reporter sequence encoding a reporter polypeptide having a reporter activity can be included in the transformation procedure and an assay for reporter activity or expression can be performed at a suitable time after transformation. A suitable time for conducting the assay typically is about 1-21 days after transformation, e.g., about 1-14 days, about 1-7 days, or about 1-3 days. The use of transient assays is particularly convenient for rapid analysis in different species, or to confirm expression of a heterologous carotenoid-modulating polypeptide whose expression has not previously been confirmed in particular recipient cells.

[0144] Techniques for introducing nucleic acids into monocotyledonous and dicotyledonous plants are known in the art, and include, without limitation, Agrobacterium-mediated transformation, viral vector-mediated transformation, electroporation and particle gun transformation, e.g., U.S. Pat. Nos. 5,538,880; 5,204,253; 6,329,571 and 6,013,863. If a cell or cultured tissue is used as the recipient tissue for transformation, plants can be regenerated from transformed cultures if desired, by techniques known to those skilled in the art.

[0145] Plant Species

[0146] The polynucleotides and vectors described herein can be used to transform a number of monocotyledonous and dicotyledonous plants and plant cell systems, including dicots such as alfalfa, almond, amaranth, apple, apricot, avocado, beans (including kidney beans, lima beans, dry beans, green beans), brazil nut, broccoli, cabbage, canola, carrot, cashew, castor bean, cherry, chick peas, chicory, chocolate, clover, cocoa, coffee, cotton, cottonseed, crambe, eucalyptus, flax, foxglove, grape, grapefruit, hazelnut, hemp, jatropha, jojoba, lemon, lentils, lettuce, linseed, macadamia nut, mango, melon (e.g., watermelon, cantaloupe), mustard, neem, olive, orange, peach, peanut, peach, pear, peas, pecan, pepper, pistachio, plum, poplar, poppy, potato, pumpkin, oilseed rape, quinoa, rapeseed (high erucic acid and canola), safflower, sesame, soaptree bark, soybean, spinach, strawberry, sugar beet, sunflower, sweet potatoes, tea, tomato, walnut, and yams, as well as monocots such as banana, barley, bluegrass, coconut, corn, date palm, fescue, field corn, garlic, millet, oat, oil palm, onion, palm kernel oil, pineapple, popcorn, rice, rye, ryegrass, sorghum, sudangrass, sugarcane, sweet corn, switchgrass, turf grasses, timothy, and wheat. Gymnosperms such as fir, pine, and spruce can also be suitable.

[0147] Thus, the methods and compositions described herein can be used with dicotyledonous plants belonging, for example, to the orders Apiales, Arecales, Aristochiales, Asterales, Batales, Campanulales, Capparales, Caryophyllales, Casuarinales, Celastrales, Cornales, Cucurbitales, Diapensales, Dilleniales, Dipsacales, Ebenales, Ericales, Eucomiales, Euphorbiales, Fabales, Fagales, Gentianales, Geraniales, Haloragales, Hamamelidales, Illiciales, Juglandales, Lamiales, Laurales, Lecythidales, Leitneriales, Linales, Magniolales, Malpighiales, Malvales, Myricales, Mynales, Nymphaeales, Papaverales, Piperales, Plantaginales, Plumbaginales, Podostemales, Polemoniales, Polygalales, Polygonales, Primulales, Proteales, Rafflesiales, Ranunculales, Rhamnales, Rosales, Rubiales, Salicales, Santales, Sapindales, Sarraceniaceae, Scrophulariales, Solanales, Trochodendrales, Theales, Umbellales, Urticales, and Violales. The methods and compositions described herein also can be utilized with monocotyledonous plants such as those belonging to the orders Alismatales, Arales, Arecales, Asparagales, Bromeliales, Commelinales, Cyclanthales, Cyperales, Eriocaulales, Hydrocharitales, Juncales, Lihales, Najadales, Orchidales, Pandanales, Poales, Restionales, Triuridales, Typhales, Zingiberales, and with plants belonging to Gymnospermae, e.g., Cycadales, Ephedrales, Ginkgoales, Gnetales, and Pinales.

[0148] The methods and compositions can be used over a broad range of plant species, including species from the dicot genera Acokanthera, Aconitum, Aesculus, Alangium, Alchomea, Alexa, Alseodaphne, Amaranthus, Ammodendron, Anabasis, Anacardium, Angophora, Anisodus, Apium, Apocynum, Arabidopsis, Arachis, Argemone, Asclepias, Atropa, Azadirachta, Beilschmiedia, Berberis, Bertholletia, Beta, Betula, Bixa, Bleekeria, Borago, Brassica, Calendula, Camellia, Camptotheca, Canarium, Cannabis, Capsicum, Carthamus, Carya, Catharanthus, Centella, Cephaelis, Chelidonium, Chenopodium, Chrysanthemum, Cicer, Cichorium, Cinchona, Cinnamomum, Cissampelos, Citrus, Citrullus, Cocculus, Cocos, Coffea, Cola, Convolvulus, Coptis, Corylus, Corymbia, Crambe, Crotalaria, Croton, Cucumis, Cucurbita, Cuphea, Cytisus, Datura, Daucus, Dendromecon, Dianthus, Dichroa, Digitalis, Dioscorea, Duguetia, Erythroxylum, Eschscholzia, Eucalyptus, Euphorbia, Euphoria, Ficus, Fragaria, Galega, Gelsemium, Glaucium, Glycine, Glycyrrhiza, Gossypium, Helianthus, Heliotropium, Hemsleya, Hevea, Hydrastis, Hyoscyamus, Jatropha, Juglans, Lactuca, Landolphia, Lavandula, Lens, Linum, Litsea, Lobelia, Luffa, Lupinus, Lycopersicon, Macadamia, Mahonia, Majorana, Malus, Mangifera, Manihot, Meconopsis, Medicago, Menispermum, Mentha, Micropus, Nicotiana, Ocimum, Olea, Origanum, Papaver, Parthenium, Persea, Petunia, Phaseolus, Physostigma, Pilocarpus, Pistacia, Pisum, Populus, Prunus, Psychotria, Pyrus, Quillaja, Rabdosia, Raphanus, Rhizocarya, Ricinus, Rosa, Rosmarinus, Rubus, Rubia, Salix, Salvia, Sanguinaria, Scopolia, Senecio, Sesamum, Simmondsia, Sinapis, Sinomenium, Solanum, Sophora, Spinacia, Stephania, Strophanthus, Strychnos, Tagetes, Theobroma, Thymus, Trifolium, Trigonella, Vaccinium, Vicia, Vigna, Vinca, and Vitis; and the monocot genera Agrostis, Allium, Ananas, Andropogon, Areca, Arundo, Asparagus, Avena, Cocos, Colchicum, Convallaria, Curcuma, Cynodon, Elaeis, Eragrostis, Festuca, Festulolium, Galanthus, Hemerocallis, Hordeum, Lemna, Lolium, Miscanthus, Musa, Oryza, Panicum, Pennisetum, Phalaris, Phleum, Phoenix, Poa, Ruscus, Saccharum, Secale, Sorghum, Triticosecale, Triticum, Veratrum, Zea, and Zoysia; and the gymnosperm genera Abies, Cephalotaxus, Cunninghamia, Ephedra, Picea, Pinus, Populus, and Pseudotsuga.

[0149] In some embodiments, a plant is a member of the species Brassica napus, Brassica rapa, Gossypium hirsutum, Glycine max, Lycopersicon esculentum, Musa paradisica, Lactuca sativa, Oryza sativa, Triticum aestivum and Zea mays.

### Methods of Inhibiting Expression of Carotenoid-Modulating Polypeptides

[0150] The polynucleotides and recombinant vectors described herein can be used to express or inhibit expression of a carotenoid-modulating polypeptide in a plant species of interest. The term “expression” refers to the process of converting genetic information of a polynucleotide into RNA through transcription, which is catalyzed by an enzyme, RNA polymerase, and into protein, through translation of mRNA on ribosomes. “Up-regulation” or “activation” refers to regulation that increases the production of expression products (mRNA, polypeptide, or both) relative to basal or native states, while “down-regulation” or “repression” refers to regulation that decreases production of expression products (mRNA, polypeptide, or both) relative to basal or native states.

[0151] A number of nucleic-acid based methods, including antisense RNA, co-suppression, ribozyme directed RNA cleavage, and RNA interference (RNAi) can be used to inhibit protein expression in plants. Antisense technology is one well-known method. In this method, a nucleic acid segment from a gene to be repressed is cloned and operably linked to a promoter so that the antisense strand of RNA is transcribed. The recombinant vector is then transformed into plants, as described above, and the antisense strand of RNA is produced. The nucleic acid segment need not be the entire sequence of the gene to be repressed, but typically will be substantially complementary to at least a portion of the sense strand of the gene to be repressed. Generally, higher homology can be used to compensate for the use of a shorter sequence. Typically, a sequence of at least 30 nucleotides is used, e.g., at least 40, 50, 80, 100, 200, 500 nucleotides or more.

[0152] Thus, for example, an isolated nucleic acid provided herein can be an antisense nucleic acid to any of the aforementioned nucleic acids encoding a carotenoid-modulating polypeptide as set forth, for example, in SEQ ID NO: 80, SEQ ID NO: 81, SEQ ID NO: 82, SEQ ID NO: 83, SEQ ID NO: 84, SEQ ID NO: 85, SEQ ID NO: 86, SEQ ID NO: 87, SEQ ID NO: 89, SEQ ID NO: 91, SEQ ID NO: 92, SEQ ID NO: 93, SEQ ID NO: 95, SEQ ID NO: 96, SEQ ID NO: 98, SEQ ID NO: 99, SEQ ID NO: 100, SEQ ID NO: 101, SEQ ID NO: 102, SEQ ID NO: 104, SEQ ID NO: 106, SEQ ID NO: 108 and SEQ ID NO: 110. A nucleic acid that decreases the level of a transcription or translation product of a gene encoding a carotenoid-modulating polypeptide is transcribed into an antisense nucleic acid that anneals to the sense coding sequence of the carotenoid-modulating polypeptide.

[0153] Constructs containing operably linked nucleic acid molecules in the sense orientation can also be used to inhibit the expression of a gene. The transcription product can be similar or identical to the sense coding sequence of a carotenoid-modulating polypeptide. The transcription product can also be unpolyadenylated, lack a 5′ cap structure, or contain an unsplicable intron. Methods of co-suppression using a full-length cDNA as well as a partial cDNA sequence are known in the art. See, e.g., U.S. Pat. No. 5,231,020.

[0154] In another method, a nucleic acid can be transcribed into a ribozyme, or catalytic RNA, that affects expression of an mRNA. (See, U.S. Pat. No. 6,423,885). Ribozymes can be designed to specifically pair with virtually any target RNA and cleave the phosphodiester backbone at a specific location, thereby functionally inactivating the target RNA. Heterologous nucleic acids can encode ribozymes designed to cleave particular mRNA transcripts, thus preventing expression of a polypeptide. Hammerhead ribozymes are useful for destroying particular mRNAs, although various ribozymes that cleave mRNA at site-specific recognition sequences can be used. Hammerhead ribozymes cleave mRNAs at locations dictated by flanking regions that form complementary base pairs with the target mRNA. The sole requirement is that the target RNA contains a 5′-UG-3′ nucleotide sequence. The construction and production of hammerhead ribozymes is known in the art. See, for example, U.S. Pat. No. 5,254,678 and WO 02/46449 and references cited therein. Hammerhead ribozyme sequences can be embedded in a stable RNA such as a transfer RNA (tRNA) to increase cleavage efficiency in vivo. Perriman et al., Proc. Natl. Acad. Sci. USA, 92(13):6175-6179 (1995); de Feyter and Gaudron, Methods in Molecular Biology, Vol. 74, Chapter 43, “Expressing Ribozymes in Plants”, Edited by Turner, P. C., Humana Press Inc., Totowa, N.J. RNA endoribonucleases which have been described, such as the one that occurs naturally in Tetrahymena thermophila, can be useful. See, for example, U.S. Pat. Nos. 4,987,071 and 6,423,885.

[0155] RNAi can also be used to inhibit the expression of a gene. For example, a construct can be prepared that includes a sequence that is transcribed into an interfering RNA. Such an RNA can be one that can anneal to itself, e.g., a double stranded RNA having a stem-loop structure. One strand of the stem portion of a double stranded RNA comprises a sequence that is similar or identical to the sense coding sequence of the polypeptide of interest, and that is from about 10 nucleotides to about 2,500 nucleotides in length. The length of the sequence that is similar or identical to the sense coding sequence can be from 10 nucleotides to 500 nucleotides, from 15 nucleotides to 300 nucleotides, from 20 nucleotides to 100 nucleotides, or from 25 nucleotides to 100 nucleotides. The other strand of the stem portion of a double stranded RNA comprises a sequence that is similar or identical to the antisense strand of the coding sequence of the polypeptide of interest, and can have a length that is shorter, the same as, or longer than the corresponding length of the sense sequence. The loop portion of a double stranded RNA can be from 10 nucleotides to 5,000 nucleotides, e.g., from 15 nucleotides to 1,000 nucleotides, from 20 nucleotides to 500 nucleotides, or from 25 nucleotides to 200 nucleotides. The loop portion of the RNA can include an intron. A construct including a sequence that is transcribed into an interfering RNA is transformed into plants as described above. Methods for using RNAi to inhibit the expression of a gene are known to those of skill in the art. See, e.g., U.S. Pat. Nos. 5,034,323; 6,326,527; 6,452,067; 6,573,099; 6,753,139; and 6,777,588. See also WO 97/01952; WO 98/53083; WO 99/32619; WO 98/36083; and U.S. Patent Publications 20030175965, 20030175783, 20040214330, and 20030180945.

[0156] In some nucleic-acid based methods for inhibition of gene expression in plants, a suitable nucleic acid can be a nucleic acid analog. Nucleic acid analogs can be modified at the base moiety, sugar moiety, or phosphate backbone to improve, for example, stability, hybridization, or solubility of the nucleic acid. Modifications at the base moiety include deoxyuridine for deoxythymidine, and 5-methyl-2′-deoxycytidine and 5-bromo-2′-deoxycytidine for deoxycytidine. Modifications of the sugar moiety include modification of the 2′ hydroxyl of the ribose sugar to form 2′-O-methyl or 2′-O-allyl sugars. The deoxyribose phosphate backbone can be modified to produce morpholino nucleic acids, in which each base moiety is linked to a six-membered morpholino ring, or peptide nucleic acids, in which the deoxyphosphate backbone is replaced by a pseudopeptide backbone and the four bases are retained. See, for example, Summerton and Weller, 1997, Antisense Nucleic Acid Drug Dev., 7:187-195; Hyrup et al., Bioorgan. Med. Chem., 4:5-23 (1996). In addition, the deoxyphosphate backbone can be replaced with, for example, a phosphorothioate or phosphorodithioate backbone, a phosphoroamidite, or an alkyl phosphotriester backbone.

### Transgenic Plant Phenotypes

[0157] A transformed cell, callus, tissue, or plant can be identified and isolated by selecting or screening the engineered plant material for particular traits or activities, e.g., those encoded by marker genes or antibiotic resistance genes. Such screening and selection methodologies are well known to those having ordinary skill in the art. In addition, physical and biochemical methods can be used to identify transformants. These include Southern analysis or PCR amplification for detection of a polynucleotide; Northern blots, S1 RNase protection, primer-extension, or RT-PCR amplification for detecting RNA transcripts; enzymatic assays for detecting enzyme or ribozyme activity of polypeptides and polynucleotides; and protein gel electrophoresis, western blots, immunoprecipitation, and enzyme-linked immunoassays to detect polypeptides. Other techniques such as in situ hybridization, enzyme staining, and immunostaining also can be used to detect the presence or expression of polypeptides and/or polynucleotides. Methods for performing all of the referenced techniques are well known.

[0158] A population of transgenic plants can be screened and/or selected for those members of the population that have a desired trait or phenotype conferred by expression of the transgene. For example, a population of progeny of a single transformation event can be screened for those plants having a desired level of expression of a carotenoid-modulating polypeptide or nucleic acid. As an alternative, a population of plants comprising independent transformation events can be screened for those plants having a desired level of a carotenoid. Selection and/or screening can be carried out over one or more generations, which can be useful to identify those plants that have a desired trait, such as increased amounts of one or more carotenoids. Selection and/or screening can also be carried out in more than one geographic location. In some cases, transgenic plants can be grown and selected under conditions which induce a desired phenotype or are otherwise necessary to produce a desired phenotype in a transgenic plant. In addition, selection and/or screening can be carried out during a particular developmental stage in which the phenotype is exhibited by the plant.

[0159] Transgenic plants can have an altered phenotype as compared to a corresponding control plant that either lacks the transgene or does not express the transgene. A polypeptide can affect the phenotype of a plant (e.g., a transgenic plant) when expressed in the plant, e.g., at the appropriate time(s), in the appropriate tissue(s), or at the appropriate expression levels. Phenotypic effects can be evaluated relative to a control plant that does not express the exogenous polynucleotide of interest, such as a corresponding wild type plant, a corresponding plant that is not transgenic for the exogenous polynucleotide of interest but otherwise is of the same genetic background as the transgenic plant of interest, or a corresponding plant of the same genetic background in which expression of the polypeptide is suppressed, inhibited, or not induced (e.g., where expression is under the control of an inducible promoter). A plant can be said “not to express” a polypeptide when the plant exhibits less than 10%, e.g., less than 9%, 8%, 7%, 6%, 5%, 4%, 3%, 2%, 1%, 0.5%, 0.1%, 0.01%, or 0.001%, of the amount of polypeptide or mRNA encoding the polypeptide exhibited by the plant of interest. Expression can be evaluated using methods including, for example, RT-PCR, Northern blots, S1 RNase protection, primer extensions, western blots, protein gel electrophoresis, immunoprecipitation, enzyme-linked immunoassays, chip assays, and mass spectrometry. It should be noted that if a polypeptide is expressed under the control of a tissue-preferential or broadly expressing promoter, expression can be evaluated in the entire plant or in a selected tissue. Similarly, if a polypeptide is expressed at a particular time, e.g., at a particular time in development or upon induction, expression can be evaluated selectively at a desired time period.

[0160] Thus, a transgenic plant or cell in which the expression of a carotenoid-modulating polypeptide is modulated can have modulated levels of one or more carotenoids relative to the carotenoid levels in a control plant that lacks or does not express the transgene. An amount of one or more of any individual carotenoid compounds can be modulated, e.g., increased or decreased, relative to a control plant not transgenic for the particular carotenoid-modulating polypeptide using the methods described herein. In certain cases, therefore, more than one carotenoid compound (e.g., two, three, four, five, six, seven, eight, nine, ten or even more carotenoid compounds) can have its amount modulated relative to a control plant or cell that is not transgenic for a carotenoid-modulating polypeptide described herein.

[0161] In some embodiments, a plant in which expression of a carotenoid-modulating polypeptide is modulated can have increased levels of one or more carotenoids in one or more tissues, e.g., aerial tissues, fruit tissues, root or tuber tissues, leaf tissues, stem tissues, or seeds. The increase in amount of one or more carotenoids can be restricted in some embodiments to particular tissues and/or organs, relative to other tissues and/or organs. For example, a transgenic plant can have an increased amount of a carotenoid in fruit tissue relative to leaf or root tissue.

[0162] The amount of one or more carotenoid compounds can be increased or decreased in a transgenic plant expressing a carotenoid-modulating polypeptide as described herein. An increase can be from about 2% to about 400% on a weight basis (e.g., a fresh or freeze dried weight basis) in such a transgenic plant compared to a corresponding control plant that lacks the recombinant nucleic acid encoding the carotenoid-modulating polypeptide. The carotenoid levels can be increased by at least 2 percent, e.g., 2, 5, 10, 15, 20, 25, 30, 35, 40, 45, 50, 55, 60, 65, 70, 75, 80, 85, 90 or more than 90 percent, as compared to the carotenoid levels in a corresponding control plant that does not express the transgene. In some embodiments, the increase is from about 5% to about 50%, or about 10% to about 40%, or about 50% to about 75%, or about 100% to about 200%, or about 200% to about 500% higher than the amount in a corresponding control cell that lacks the recombinant nucleic acid encoding a carotenoid-modulating polypeptide. In some embodiments, an increase can be from about 1.2-fold to about 10-fold, or about 1.2-fold to about 8-fold, or about 1.2-fold to about 6-fold, or about 1.2-fold to about 5-fold, or about 1.2-fold to about 4-fold, or about 1.2-fold to about 3-fold, or about 1.2-fold to about 2-fold, or about 1.3-fold to about 6-fold, or about 1.3-fold to about 5-fold, or about 1.3-fold to about 4-fold, or about 1.3-fold to about 3-fold, or about 1.3-fold to about 2.5-fold, or about 1.3-fold to about 2-fold, or about 1.3-fold to about 1.5-fold, or about 1.5-fold to about 6-fold, or about 1.5-fold to about 5-fold, or about 1.5-fold to about 4-fold, or about 1.5-fold to about 3-fold, or about 1.5-fold to about 2-fold, or about 2-fold to about 6-fold, or about 3-fold to about 4-fold, or about 3-fold to about 7-fold, or about 4-fold to about 8-fold, or about 5-fold to about 10-fold, higher than the amount in corresponding control cells or tissues that lack the recombinant nucleic acid encoding the carotenoid-modulating polypeptide.

[0163] In other embodiments, the carotenoid compound that is increased in transgenic plants or plant cells expressing a carotenoid-modulating polypeptide as described herein is either not produced or is not detectable in a corresponding control plant or plant cell that lacks the recombinant nucleic acid encoding the carotenoid-modulating polypeptide. Thus, in such embodiments, the increase in such a carotenoid compound is infinitely higher in a transgenic plant containing a recombinant nucleic acid encoding a carotenoid-modulating polypeptide than in a corresponding control plant or plant cell that lacks the recombinant nucleic acid encoding the carotenoid-modulating polypeptide. For example, in certain cases, a carotenoid-modulating polypeptide described herein may activate a biosynthetic pathway in a plant that is not normally activated or operational in a control plant, and one or more new carotenoids that were not previously produced in that plant species can be produced.

[0164] In some embodiments, a plant in which expression of a carotenoid-modulating polypeptide is modulated can have decreased levels of one or more carotenoids in one or more tissues, e.g., aerial tissues, fruit tissues, root or tuber tissues, leaf tissues, stem tissues, or seeds. The decrease in amount of one or more carotenoids can be restricted in some embodiments to particular tissues and/or organs, relative to other tissues and/or organs. For example, a transgenic plant can have a decreased amount of a carotenoid in fruit tissue relative to leaf or root tissue.

[0165] The amount of one or more carotenoid compounds can be increased or decreased in a transgenic plant expressing a carotenoid-modulating polypeptide as described herein. A decrease can be from about 2% to about 80% on a weight basis (e.g., a fresh or freeze dried weight basis) in such a transgenic plant compared to a corresponding control plant that lacks the recombinant nucleic acid encoding the carotenoid-modulating polypeptide. The carotenoid levels can be decreased by at least 2 percent, e.g., 2, 5, 10, 15, 20, 25, 30, 35, 40, 45, 50, 55, 60, 65, 70, 75, 80, or more than 80 percent, as compared to the carotenoid levels in a corresponding control plant that does not express the transgene. In some embodiments, the decrease is from about 5% to about 50%, or about 10% to about 40%, or about 50% to about 75%, or about 60% to about 80% lower than the amount in a corresponding control cell that lacks the recombinant nucleic acid encoding a carotenoid-modulating polypeptide. In some embodiments, the carotenoid level is from about 0.2-fold to about 0.9-fold, or from about 0.3-fold to about 0.8-fold, or from about 0.5-fold to about 0.9-fold or from about 0.4-fold to about 0.9 fold, or from about 0.4-fold to about 0.7-fold lower than the amount in a corresponding control cell that lacks the recombinant nucleic acid encoding a carotenoid-modulating polypeptide.

[0166] In certain embodiments, a carotenoid compound that is decreased in transgenic plants or plant cells expressing a carotenoid-modulating polypeptide as described herein is decreased to an undetectable level as compared to the level in a corresponding control plant or plant cell that lacks the recombinant nucleic acid encoding the carotenoid-modulating polypeptide.

[0167] In some embodiments, the amounts of two or more carotenoids are increased and/or decreased, e.g., the amounts of two, three, four, five, six, seven, eight, nine, ten (or more) carotenoid compounds are independently increased and/or decreased.

[0168] The amount of a carotenoid compound can be determined by known techniques, e.g., by extraction of carotenoid compounds from plants or plant tissues followed by gas chromatography-mass spectrometry (GC-MS) or liquid chromatography-mass spectrometry (LC-MS). If desired, the structure of the carotenoid compound can be confirmed by GC-MS, LC-MS, nuclear magnetic resonance and/or other known techniques.

[0169] Typically, a difference (e.g., an increase) in the amount of any individual carotenoid compound in a transgenic plant or cell relative to a control plant or cell is considered statistically significant at p<0.05 with an appropriate parametric or non-parametric statistic, e.g., Chi-square test, Student's t-test, Mann-Whitney test, or F-test. In some embodiments, a difference in the amount of any individual carotenoid compound is statistically significant at p<0.01, p<0.005, or p<0.001. A statistically significant difference in, for example, the amount of any individual carotenoid compound in a transgenic plant compared to the amount in cells of a control plant indicates that (1) the recombinant nucleic acid present in the transgenic plant results in altered levels of one or more carotenoid compounds and/or (2) the recombinant nucleic acid warrants further study as a candidate for altering the amount of a carotenoid compound in a plant.

[0170] Increases in carotenoids in plants can provide increased yields of carotenoids extracted from the plant tissues and increased nutritional content in foodstuffs and animal feed produced from the plant tissues. Decreases in carotenoids in plants can be useful in situations where altering the color or appearance of a plant is desired.

[0171] Information that the polypeptides disclosed herein can modulate carotenoid content can be useful in breeding of crop plants. Based on the effect of disclosed polypeptides on carotenoid content, one can search for and identify polymorphisms linked to genetic loci for such polypeptides. Polymorphisms that can be identified include simple sequence repeats (SSRs), rapid amplification of polymorphic DNA (RAPDs), amplified fragment length polymorphisms (AFLPs) and restriction fragment length polymorphisms (RFLPs).

[0172] If a polymorphism is identified, its presence and frequency in populations is analyzed to determine if it is statistically significantly correlated to an alteration in carotenoid content. Those polymorphisms that are correlated with an alteration in carotenoid content can be incorporated into a marker assisted breeding program to facilitate the development of lines that have a desired alteration in carotenoid content. Typically, a polymorphism identified in such a manner is used with polymorphisms at other loci that are also correlated with a desired alteration in carotenoid content.

### Methods of Producing Carotenoids

[0173] Also provided herein are methods for producing one or more carotenoids. Exemplary carotenoids include, without limitation, phytoene, α-carotene, cis-β-carotene, trans-β-carotene, γ-carotene, δ-carotene, ζ-carotene, zeacarotene, lycopene, lutein, zeaxanthin, antheraxanthin, astaxanthin, bixin, capsanthin, fucoxanthin, β-cryptoxanthin, neoxanthin, and violaxanthin. Such methods can include growing a plant cell that includes a nucleic acid encoding a carotenoid-modulating polypeptide as described herein, under conditions effective for the expression of the carotenoid-modulating polypeptide. Also provided herein are methods for modulating (e.g., altering, increasing, or decreasing) the amounts of one or more carotenoids in a plant cell. The methods can include growing a plant cell as described above, i.e., a plant cell that includes a nucleic acid encoding a carotenoid-modulating polypeptide as described herein. The one or more carotenoids produced by these methods can be novel carotenoids, e.g., not normally produced in a wild-type plant cell.

[0174] The methods can further include the step of recovering one or more carotenoids from the cells. For example, plant cells known or suspected of producing one or more carotenoids can be subjected to fractionation to recover a desired carotenoid. Typically, fractionation is guided by in vitro assay of fractions. In some instances, cells containing one or more carotenoid compounds can be separated from cells not containing, or containing lower amounts of the carotenoid, in order to enrich for cells or cell types that contain the desired compound(s). A number of methods for separating particular cell types or tissues are known to those having ordinary skill in the art.

[0175] Fractionation can be carried out by techniques known in the art. For example, plant tissues or organs can be extracted with 100% MeOH to give a crude oil which is partitioned between several solvents in a conventional manner. As an alternative, fractionation can be carried out on silica gel columns using methylene chloride and ethyl acetate/hexane solvents.

[0176] In some embodiments, a fractionated or unfractionated plant tissue or organ is subjected to mass spectrometry in order to identify and/or confirm the presence of a desired carotenoid(s). See, e.g., WO 02/37111. In some embodiments, electrospray ionization (ESI) mass spectrometry can be used. In other embodiments, atmospheric pressure chemical ionization (APCI) mass spectrometry is used. If it is desired to identify higher molecular weight molecules in an extract, matrix-assisted laser desorption/ionization time-of-flight (MALDI-TOF) mass spectrometry can be useful.

[0177] Articles of Manufacture

[0178] Transgenic plants provided herein have particular uses in the agricultural and nutritional industries. For example, transgenic plants described herein can be used to make food products such as fresh, frozen, or canned vegetables and fruits. Suitable plants with which to make such products include, without limitation, tomatoes, lettuce, bananas, rice, corn, wheat, canola, cotton, soybean, mangos, melons, strawberries, peaches, apricots, oranges, papayas, corn, sweet potatoes, carrots, pumpkin, peppers, kale and spinach. Transgenic plants described herein can also be used to make processed food products such as tomato sauce, ketchup, jellies, and jams from the above fruits and vegetables. Such products are useful to provide increased amounts of carotenoids in a human diet.

[0179] Transgenic plants described herein can also be used as a source of animal feeds. Suitable plants with which to make such products include maize, wheat, soybean, cotton, canola, sunflower, safflower, oats, barley, and millet.

[0180] Transgenic plants or tissues from transgenic plants described herein can also be used as a source from which to extract carotenoids, using techniques known in the art. The resulting extract can be included in nutritional supplements as well as processed food products, e.g., snack products, frozen entrees, vegetable oils, breakfast cereals, and baby foods. The extracted carotenoids can also be used as starting materials for making fragrance chemicals for perfumes and other cosmetics.

[0181] Seeds of transgenic plants described herein can be conditioned and bagged in packaging material by means known in the art to form an article of manufacture. Packaging material such as paper and cloth are well known in the art. A package of seed can have a label e.g., a tag or label secured to the packaging material, a label printed on the packaging material, or a label inserted within the package. The package label may indicate that the seed herein incorporates transgenes that provide increased amounts of one or more carotenoids in one or more tissues of plants grown from such seeds.

[0182] A number of embodiments of the invention have been described. Nevertheless, it will be understood that various modifications may be made without departing from the spirit and scope of the invention. Accordingly, other embodiments are within the scope of the following claims.

### EXAMPLES

### Example 1

### Transgenic Plants

[0183] The following symbols are used in the Examples: T1: first generation transformant; T2: second generation, progeny of self-pollinated T1 plants; T3: third generation, progeny of self-pollinated T2 plants. Independent transformations are referred to as events.

[0184] The following nucleic acids were isolated from Arabidopsis thaliana plants. Ceres Clone 34553 (SEQ ID NO: 79) is a cDNA clone that is predicted to encode a bZIP transcription factor polypeptide. Ceres Clone 21863 (SEQ ID NO: 88) is a cDNA clone that is predicted to encode an amino acid ubiquitin protein ligase. Ceres Clone 968026 (SEQ ID NO: 90) is a cDNA clone that is predicted to encode an amino acid response regulator 6 protein. Ceres Clone 641355 (SEQ ID NO: 109) is a cDNA clone that is predicted to encode an EREBP DNA-binding domain containing protein. Ceres Clone 13930 (SEQ ID NO: 103) is a cDNA clone that is predicted to encode a TPR domain protein. Ceres Clone 34589 (SEQ ID NO: 94) is a cDNA clone that is predicted to encode a Myb-like DNA binding domain-containing polypeptide. Ceres Clone 316638 (SEQ ID NO: 97) is a cDNA clone that is predicted to encode an ADP ribosylation factor polypeptide.

[0185] Each isolated nucleic acid described above was cloned, using standard molecular biology techniques, into a Ti plasmid vector, CRS 338, which encodes a selectable marker gene, phosphinothricin acetyltransferase, that confers Finale® resistance to transformed plants. Constructs were made using the CRS 338 vector that contained either the cDNA Ceres Clone 34553 (SEQ ID NO: 79), the cDNA Ceres Clone 21863 (SEQ ID NO: 88), Ceres Clone 968026 (SEQ ID NO: 90) Ceres Clone 641355 (SEQ ID NO: 109), Ceres Clone 13930 (SEQ ID NO: 103), or Ceres Clone 34589 (SEQ ID NO: 94), Ceres Clone 316638 (SEQ ID NO: 97) operably linked in the sense orientation relative to a CaMV 35S constitutive promoter.

[0186] The constructs were introduced separately into Arabidopsis ecotype Wassilewskija (WS-2) plants by the floral dip method essentially as described in Bechtold, N. et al., C.R. Acad. Sci. Paris, 316:1194-1199 (1993). Transgenic Arabidopsis plants containing Ceres Clone 34553 (SEQ ID NO: 79), Ceres Clone 21863 (SEQ ID NO: 88), Ceres Clone 968026 (SEQ ID NO: 90), Ceres Clone 641355 (SEQ ID NO: 109), Ceres Clone 13930 (SEQ ID NO: 103), or Ceres Clone 34589 (SEQ ID NO: 94), Ceres Clone 316638 (SEQ ID NO: 97) were designated ME03037, ME04864, ME05220, ME05058, ME06485, ME01130, or ME12093 Events, respectively. The presence of the vector DNA in each of these events was confirmed by screening the T1 plants for Finale® resistance. Control plants were transformed with the CRS vector lacking the cDNA insert.

[0187] T1 plants from ME03037, ME04864 and ME05220 events were evaluated for morphology and development. Morphology and development for 9 out of 10 plants from ME03037 events were similar to that of control plants; Event ME03037-01 had a few leaves which appeared lanceolate in shape. Morphology and development for 9 out of 10 plants from ME04864 events were similar to that of control plants; Event ME04864-01 had fewer leaves which appeared lanceolate in shape. Morphology and development for 9 out of 10 plants from ME05220 events were similar to that of control plants; Event ME05220-01 had fewer leaves which appeared lanceolate in shape.

[0188] T1 seeds were germinated and allowed to self-pollinate. T2 seeds were collected and a portion was germinated, allowed to self-pollinate, and T3 seeds were collected.

### Example 2

### Analysis of Carotenoids in Transgenic Arabidopsis Aerial Tissues

[0189] For carotenoid and chlorophyll profiling, aerial tissues from four Finale®-resistant plants of each event were pooled, frozen in liquid nitrogen and lyophilized. Tissues were then crushed into a fine powder and stored at −80° C.

[0190] For analysis of samples described in Example 3, 20 mg of lyophilized, ground aerial tissue was extracted in a 1:1 mixture of methanol/50 mM Tris-HCl (pH 7.5, 1 mM NaCl) in the dark at 4° C. Extracts were portioned using dichloromethane and the non-polar phase was subsequently removed and dried in vacuo. The dried non-polar phase was resuspended in ethyl acetate and analyzed using HPLC-PDA utilizing a methanol/tert-butyl methyl ether mobile phase and a C30 column. Chromatographic peaks were identified by either standard, UV spectrum or both. For data analysis, peak areas were calculated by the chromatography software and validated manually. Resulting areas were exported to Microsoft Excel where additional data analysis was performed.

[0191] For analysis of samples described in Examples 4, 5, 6, 7, 8, and 9, about 30 mg±3 mg of ground tissue was extracted with 1.5 mL of a 4:3 v/v of ethanol and hexane containing 0.05% w/v butylatedhydroxy toluene. Sixty μL of a solution containing 1 μg/μL of trans-crocetin in ethanol was added as an internal standard. The mixture was mixed by inversion on an orbital shaker for 45 minutes at 4° C. in the dark. Care was taken not to expose the extract to heat or light. The extract was, decanted into a syringe and filtered through a 0.22 micron filter into an amber LC-MS vial. The extract was analyzed for carotenoid content using a Waters 2795 Alliance system with a 996 PDA Detector, a Micromass ZMD single quadrupole mass spectrometer, and an atmospheric pressure chemical ionization probe (Waters Corp., Milford, Mass.). Separation of molecules was accomplished using a Luna C₁₈(2) 4.6×150 mm column (Phenomenex, Torrance, Calif.). Carotenoid compounds were identified based on spectral characteristics and comparison to reference standards and published retention times.

### Example 3

### Analysis of ME03037 Events

[0192] Carotenoid levels in aerial tissues from four ME03037 T2 events and four ME03037 T3 events, each containing Ceres Clone 34553 (SEQ ID NO: 79) were analyzed as described in Example 2. Increases in β-carotene content relative to the transgenic control plants were observed in ME03037 events as described below.

[0193] The cis-β-carotene content in T2 aerial tissue from two events of ME03037 was significantly increased relative to the cis-β-carotene content in aerial tissues in transgenic control plants. As shown in Table 1, cis-β-carotene levels in aerial tissues from events ME03037-02 and ME03037-03 were increased by 21% and 30%, respectively, compared to the cis-β-carotene levels in transgenic control plants.

[0194] The cis-β-carotene content in T3 aerial tissue from two events of ME03037 was significantly increased relative to the cis-β-carotene content in aerial tissues in transgenic control plants. As shown in Table 1, cis-β-carotene levels in aerial tissues from events ME03037-02 and ME03037-03 were increased by 41% and 28%, respectively, compared to the cis-β-carotene levels in transgenic control plants.

TABLE 1
cis-β-Carotene Levels (% Control) in ME03037 T₂ and T₃ Generations

| | ME03037-02 | ME03037-03 | ME03037-04 | ME03037-05 | Control |
|---|---|---|---|---|---|
| T₂ | 121 ± 11 | 130 ± 4 | 117 ± 7 | 104 ± 19 | 100 ± 9 |
| p-value | 0.03 | p < 0.01 | 0.05 | 0.88 | NA |
| T₃ | 141 ± 12 | 128 ± 9 | 113 ± 2 | 110 ± 12 | 100 ± 11 |
| p-value | 0.03 | 0.03 | p < 0.01 | 0.33 | NA |

N/A = not applicable
p-values were calculated using a Student's t-test

[0195] Aerial tissues from ME03037 T2 and T3 events were also increased in trans-β-carotene content. The combined area under the peaks corresponding to cis-β-carotene and trans-β-carotene was increased in extracts fromT2 Events ME03037-02 and ME03037-03 relative to the corresponding peak are in extracts from non-transgenic controls, although the increase was not statistically significant (p>0.05). The combined area under the peaks corresponding to cis-β-carotene and trans-β-carotene was significantly increased in extracts from T3 Events ME03037-02 and ME03037-03 relative to the corresponding area in extracts from non-transgenic controls.

[0196] There were no observable or statistically significant differences between T2 ME03037 and control plants in germination, onset of flowering, rosette area, fertility, and general morphology/architecture.

### Example 4

### Analysis of ME04864 Events

[0197] Carotenoid levels in aerial tissues from five ME04864 T2 events and five ME04864 T3 events, each containing Ceres Clone 21863 (SEQ ID NO: 88) were analyzed as described in Example 2.

[0198] The trans-lutein content in T2 aerial tissue from two events of ME04864 was significantly increased relative to the trans-lutein content in aerial tissues in non-transgenic control plants. As shown in Table 2, trans-lutein levels in aerial tissues from events ME04864-01 and ME04864-02 were increased by 71% and 66%, respectively, relative to trans-lutein levels in non-transgenic control plants. The standard error for this experiment was calculated based on three replicates for the experimental events and 12 replicates for the transgenic controls. Each replicate represented an extraction of pooled tissues from four individual plants.

[0199] The trans-lutein content in T3 aerial tissue from two events of ME04864 was significantly increased relative to the trans-lutein content in aerial tissues in non-transgenic control plants. Trans-lutein levels in aerial tissues from events ME04864-01 and ME04864-02 were increased by 32% and 23%, respectively, relative to trans-lutein levels in non-transgenic control plants. The standard error for this experiment was calculated based on three replicates for the experimental events and 12 replicates for the transgenic controls.

[0200] To confirm that the trans-lutein levels for all samples were within the linear range of analysis for the assay, a standard LC-MS calibration curve was prepared using a trans-lutein standard. Concentrations of the standard were 0.001, 0.01, 0.1, 1.0, and 10 mg/L; the R² value for the curve was 0.998.

TABLE 2
Trans-lutein content (% control) in ME04864 aerial tissue in T2 and T3 generations

| | ME04864-01 | ME04864-02 | ME04864-03 | ME04864-04 | ME04864-05 | Control |
|---|---|---|---|---|---|---|
| T2 | 171 ± 15 | 166 ± 10 | 181 ± 20 | 140 ± 15 | 124 ± 6 | 100 ± 6 |
| p-value* | 0.03 | 0.01 | 0.04 | 0.10 | 0.02 | N/A |
| T3 | 132 ± 7 | 123 ± 1 | 111 ± 4 | 115 ± 14 | 113 ± 0 | 100 ± 6 |
| p-value* | 0.01 | <0.01 | 0.19 | 0.40 | 0.05 | N/A |

N/A = not applicable
*p-values were calculated using a Student's t-test

[0201] The β-carotene levels in aerial tissues of T2 and T3 ME04864 events are shown in Table 3. As used in this example, β-carotene includes both isomers of β-carotene, i.e., cis-β-carotene and trans-β-carotene. The β-carotene content in T3 aerial tissue from two events of ME04864 was significantly increased relative to the β-carotene content in aerial tissues in transgenic control plants. β-carotene levels in aerial tissues from events ME04864-04 and ME04864-05 were increased by 55% and 43%, respectively, relative to β-carotene levels in transgenic control plants.

TABLE 3
β-carotene levels (% control) in ME04864 aerial tissue in T₂ and T₃ generations

| | ME04864-01 | ME04864-02 | ME04864-03 | ME04864-04 | ME04864-05 | Control |
|---|---|---|---|---|---|---|
| T2 | 123 ± 36 | 128 ± 34 | 151 ± 35 | 178 ± 48 | 140 ± 28 | 100 ± 7 |
| p-value* | 0.60 | 0.50 | 0.27 | 0.24 | 0.28 | N/A |
| T3 | 121 ± 46 | 106 ± 15 | 114 ± 37 | 155 ± 10 | 143 ± 9 | 100 ± 7 |
| p-value* | 0.70 | 0.82 | 0.78 | 0.01 | 0.01 | N/A |

N/A = not applicable
*p-values were calculated using a Student's t-test

[0202] There were no observable or statistically significant differences between T2 ME04864-02, ME04864-03, and control plants in germination, onset of flowering, rosette area, and general morphology/architecture. Finale® resistance for the T2 Event ME04864-01 segregated at a 3:1 ratio of resistance:sensitivity, consistent with the presence of a single insert. Finale® resistance for the T2 Event ME04864-02 segregated at a 15:1 ratio of resistance:sensitivity, consistent with the presence of two inserts.

### Example 5

### Analysis of ME05220 Events

[0203] Carotenoid levels in aerial tissues from five ME05220 T2 events and five ME05220 T3 events, each containing Ceres Clone 968026 (SEQ ID NO: 90) were analyzed as described in Example 2.

[0204] The ζ-carotene content in T2 aerial tissue from two events of ME05220 was significantly increased relative to the ζ-carotene content in aerial tissues in transgenic control plants. As shown in Table 4, ζ-carotene levels in aerial tissues from events ME05220-01 and ME05220-04 were increased by 102% and 138%, respectively, relative to ζ-carotene levels in transgenic control plants. The standard error for this experiment was calculated based on three replicates for the experimental events and 12 replicates for the transgenic controls. Each replicate represented an extraction of pooled tissues from four individual plants.

[0205] The ζ-carotene content in T3 aerial tissue from two events of ME05220 was significantly increased relative to the ζ-carotene content in aerial tissues in transgenic control plants. ζ-carotene levels in aerial tissues from events ME05220-01 and ME05220-04 were increased by 92% and 102%, respectively, relative to ζ-carotene levels in transgenic control plants

[0206] The standard error for this experiment was calculated based on three replicates for the experimental events and 12 replicates for the transgenic controls.

TABLE 4
ζ-carotene content (% control) in ME05220 T2 and T3 aerial tissue

| | ME05220-01 | ME05220-02 | ME05220-03 | ME05220-04 | ME05220-05 | Control |
|---|---|---|---|---|---|---|
| T2 | 202 ± 23 | 485 ± 154 | 129 ± 20 | 238 ± 104 | 140 ± 29 | 100 ± 9 |
| p-value* | 0.02 | <0.01 | 0.38 | 0.04 | 0.37 | N/A |
| T3 | 192 ± 37 | 105 ± 22 | 80 ± 20 | 202 ± 26 | 65 ± 18 | 100 ± 9 |
| p-value* | 0.03 | 0.98 | 0.32 | 0.02 | 0.17 | N/A |

N/A = not applicable
*p-values were calculated using a Student's t-test

[0207] There were no observable or statistically significant differences between T2 ME05220-01, ME05220-04, and control plants in germination, onset of flowering, rosette area, and general morphology/architecture. Finale® resistance for the T2 ME05220-01 and ME05220-04 events segregated at a 3:1 ratio of resistance:sensitivity, consistent with the presence of a single insert.

### Example 6

### Analysis of ME05058 Events

[0208] Carotenoid levels in aerial tissues from five ME05058 T2 events and four T3 events, each containing Ceres Clone 641355 (SEQ ID NO: 109), were analyzed as described in Example 2. To confirm that the trans-lutein levels for all samples were within the linear range of analysis for this assay, a standard LC-MS calibration curve was prepared using a trans-lutein standard according to the method described in Example 3.

[0209] As shown in Tables 5-7, the trans-lutein, neoxanthin, and violoxanthin contents in T2 aerial tissue from two events of ME05058 was significantly increased relative to the corresponding amounts in aerial tissues in transgenic control plants. For example, as shown in Table 5, trans-lutein levels in aerial tissues from T2 events ME05058-01 and ME05058-02 were increased by 216% and by 111%, respectively, relative to trans-lutein levels in transgenic control plants. Trans-lutein levels in aerial tissues from T3 events ME05058-01 and ME05058-02 were increased by 128% and by 67%, respectively, relative to trans-lutein levels in transgenic control plants. The standard error for this experiment was calculated based on three replicates for the experimental events and 12 replicates for the transgenic controls. Each replicate represented an extraction of pooled tissues from four individual plants.

TABLE 5
Trans-Lutein Increase (Fold-Increase) In ME05058 T₂ and T₃ Generation

| | ME05058-01 | ME05058-02 | ME05058-03 | ME05058-04 | ME05058-05 | Control |
|---|---|---|---|---|---|---|
| T₂ | 3.16 ± 0.13 | 2.11 ± 0.04 | 1.62 ± 0.13 | 1.23 ± 0.04 | 1.35 ± 0.04 | 1.00 ± 0.36 |
| p-value | 0.04 | p < 0.01 | 0.08 | 0.18 | 0.12 | N/A |
| T₃ | 2.28 ± 0.12 | 1.67 ± 0.08 | 1.69 ± 0.02 | Not | 1.82 ± 0.09 | 1.00 ± 0.07 |
| | | | | determined | | |
| p-value | 0.02 | 0.03 | p < 0.01 | Not | 0.02 | N/A |
| | | | | determined | | |

*p-values were calculated using a Student's t-test

[0210] As shown in Table 6, neoxanthin levels in aerial tissues from T2 events ME05058-01 and ME05058-02 were increased by 155% and by 133%, respectively, relative to neoxanthin levels in transgenic control plants. Neoxanthin levels in aerial tissues from T3 events ME05058-01 and ME05058-02 were increased by 112% and by 67%, respectively, relative to neoxanthin levels in transgenic control plants.

TABLE 6
Neoxanthin Increase (Fold Increase) in ME05058 T₂ and T₃ Generation

| | ME05058-01 | ME05058-02 | ME05058-03 | ME05058-04 | ME05058-05 | Control |
|---|---|---|---|---|---|---|
| T₂ | 2.55 ± 0.01 | 2.33 ± 0.01 | 2.32 ± 0.01 | 1.62 ± 0.01 | 1.47 ± 0.01 | 1.00 ± 0.33 |
| p-value | 0.02 | 0.04 | 0.21 | 0.23 | 0.12 | N/A |
| T₃ | 2.12 ± 0.01 | 1.67 ± 0.01 | 1.50 ± 0.01 | Not | 1.50 ± 0.01 | 1.00 ± 0.16 |
| | | | | determined | | |
| p-value | p < 0.01 | p < 0.01 | 0.18 | Not | 0.04 | N/A |
| | | | | determined | | |

*p-values were calculated using a Student's t-test

[0211] As shown in Table 7, violaxanthin levels in aerial tissues from T2 events ME05058-01 and ME05058-02 were increased by 188% and by 128%, respectively, relative to violaxanthin levels in transgenic control plants. Violaxanthin levels in aerial tissues from T3 events ME05058-01 and ME05058-02 were increased by 166% and by 45%, respectively, relative to violaxanthin levels in transgenic control plants.

TABLE 7
Violaxanthin Increase (Fold Increase) in ME05058 T₂ and T₃ Generation

| | ME05058-01 | ME05058-02 | ME05058-03 | ME05058-04 | ME05058-05 | Control |
|---|---|---|---|---|---|---|
| T₂ | 2.88 ± 0.01 | 2.28 ± 0.01 | 2.20 ± 0.01 | 1.49 ± 0.01 | 1.72 ± 0.01 | 1.00 ± 0.23 |
| p-value | 0.05 | 0.04 | 0.23 | 0.24 | 0.12 | N/A |
| T₃ | 2.66 ± 0.01 | 1.45 ± 0.01 | 1.74 ± 0.01 | Not | 2.03 ± 0.01 | 1.00 ± 0.07 |
| | | | | determined | | |
| p-value | p < 0.01 | 0.05 | 0.02 | Not | p < 0.01 | N/A |
| | | | | determined | | |

*p-values were calculated using a Student's t-test

[0212] Chlorophyll a and b levels were also analyzed from the ME05058 events. As shown in Table 8, the chlorophyll a level was significantly increased in aerial tissues from four T2 events (ME05058-01, -02, -04, and -05), relative to transgenic control plants. The chlorophyll a level was significantly increased in aerial tissues from one T3 event (ME05058-03), relative to transgenic control plants.

[0213] As shown in Table 9, chlorophyll b levels were significantly increased in aerial tissues from two T2 (ME05058-01 and -02) events, relative to transgenic control plants. Chlorophyll b levels were significantly increased in aerial tissues from one T3 event (ME05058-05), relative to transgenic control plants.

TABLE 8
Chlorophyll a Increase (Fold Increase) in ME05058 T₂ and T₃ Generations

| | ME05058-01 | ME05058-02 | ME05058-03 | ME05058-04 | ME05058-05 | Control |
|---|---|---|---|---|---|---|
| T₂ | 1.97 ± 0.09 | 1.88 ± 0.07 | 1.42 ± 0.08 | 1.31 ± 0.02 | 1.43 ± 0.03 | 1.00 ± 0.42 |
| p-value | 0.04 | 0.02 | 0.13 | 0.03 | 0.01 | N/A |
| T₃ | 1.39 ± 0.03 | 1.12 ± 0.01 | 1.41 ± 0.01 | Not | 1.35 ± 0.05 | 1.00 ± 0.15 |
| | | | | determined | | |
| p-value | 0.25 | 0.06 | 0.01 | Not | 0.21 | N/A |
| | | | | determined | | |

*p-values were calculated using a Student's t-test

TABLE 9
Chlorophyll b Increase (Fold Increase) in ME05058 T₂ and T₃ Generations

| | ME05058-01 | ME05058-02 | ME05058-03 | ME05058-04 | ME05058-05 | Control |
|---|---|---|---|---|---|---|
| T₂ | 2.19 ± 0.01 | 2.33 ± 0.01 | 1.71 ± 0.01 | 1.17 ± 0.01 | 1.23 ± 0.01 | 1.00 ± 0.36 |
| p-value | 0.03 | p < 0.01 | 0.13 | 0.31 | 0.19 | N/A |
| T₃ | 1.90 ± 0.01 | 1.14 ± 0.01 | 1.32 ± 0.01 | Not | 1.37 ± 0.01 | 1.00 ± 0.16 |
| | | | | determined | | |
| p-value | 0.09 | 0.30 | 0.20 | Not | 0.04 | N/A |
| | | | | determined | | |

*p-values were calculated using a Student's t-test

[0214] It is noteworthy that all T2 and T3 ME5058 events analyzed exhibited a “staygreen” phenotype, regardless of whether there was a significant increase in chlorophyll a or b levels. The T2 and T3 ME05058 events were darker green in color and had shinier rosettes than did the corresponding transgenic control plants.

[0215] There were no observable or statistically significant differences between T2 ME05058 events and control plants in germination, onset of flowering, rosette area, and general morphology/architecture. Seed yield was decreased in T2 ME05058 events relative to that of control plants. Finale® resistance for the T2 ME05058 events segregated at a 3:1 ratio of resistance:sensitivity, consistent with the presence of a single insert.

### Example 7

### Analysis of ME06485 Events

[0216] Carotenoid levels in aerial tissues from four ME06485 T2 events and four T3 events, each containing Ceres Clone 13930 (SEQ ID NO: 103), were analyzed as described in Example 2. As shown in Table 10, the β-carotene levels in T2 aerial tissue from two events of ME06485 were increased relative to the corresponding amounts in aerial tissues in transgenic control plants. For example, as shown in Table 10, β-carotene levels in aerial tissues from events ME06485-04 and ME06485-05 were increased by 57% and 150%, respectively, relative to the β-carotene levels in transgenic control plants. The standard error for this experiment was calculated based on three replicates for the experimental events and 12 replicates for the transgenic controls. Each replicate represented an extraction of pooled tissues from four individual plants. No statistically significant increases in β-carotene were noted for the T3 aerial tissues from the ME06485 events.

[0217] There were no observable or statistically significant differences between T2 ME06485 events and control plants in germination, onset of flowering, rosette area, seed yield, and general morphology/architecture.

TABLE 10
β-Carotene Increase (Fold Increase) in ME06485 T₂ and T₃ Generations

| | ME06485-01 | ME06485-03 | ME06485-04 | ME06485-05 | Control |
|---|---|---|---|---|---|
| T₂ | 1.28 ± 0.98 | 0.91 ± 0.38 | 1.57 ± 0.26 | 2.50 ± 0.50 | 1.00 ± 0.44 |
| p-value | 0.8 | 0.62 | 0.04 | 0.02 | N/A |
| T₃ | 1.36 ± 0.63 | 0.95 ± 0.87 | 1.11 ± 0.53 | 1.07 ± 0.46 | 1.00 ± 0.44 |
| p-value | 0.49 | 0.85 | 0.88 | 0.42 | N/A |

*p-values were calculated using a Student's t-test

### Example 8

### Analysis of ME01130 Events

[0218] Carotenoid levels in aerial tissues from five ME01130 T2 events and five T3 events, each containing Ceres Clone 34589 (SEQ ID NO: 94), were analyzed as described in Example 2.

[0219] As shown in Table 11, the zeaxanthin levels in T2 aerial tissue from two events of ME01130 were significantly increased relative to the corresponding amounts in aerial tissues in transgenic control plants. For example, as shown in Table 11, zeaxanthin levels in aerial tissues from T2 events ME01130-01 and ME01130-05 were increased by 27% and 55%, respectively, relative to the zeaxanthin levels in transgenic control plants. The standard error for this experiment was calculated based on three replicates for the experimental events and 12 replicates for the transgenic controls. Each replicate represented an extraction of pooled tissues from four individual plants. No statistically significant increases in zeaxanthin were noted for the T3 aerial tissues from the ME06485 events.

[0220] There were no observable or statistically significant differences between T2 ME01130 events and control plants in germination, onset of flowering, rosette area, seed yield, and general morphology/architecture.

TABLE 11
Zeaxanthin Increase (Fold-Increase) in ME01130 T₂ and T₃ Generations

| | ME01130-01 | ME01130-02 | ME01130-03 | ME01130-04 | ME01130-05 | Control |
|---|---|---|---|---|---|---|
| T₂ | 1.27 ± 0.11 | 1.04 ± 0.17 | 1.44 ± 0.25 | 1.40 ± 0.10 | 1.55 ± 0.13 | 1.00 ± 0.22 |
| p-value | 0.02 | 0.06 | 0.2 | 0.06 | p < 0.01 | N/A |
| T₃ | 1.24 ± 0.17 | 0.96 ± 0.13 | 1.25 ± 0.16 | 0.93 ± 0.12 | 1.11 ± 0.21 | 1.00 ± 0.22 |
| p-value | 0.06 | 0.88 | 0.27 | 0.85 | 0.05 | N/A |

*p-values were calculated using a Student's t-test

### Example 9

### Analysis of ME12093 Events

[0221] Carotenoid levels in aerial tissues from three ME12093 T2 events and three T3 events, each containing Ceres Clone 316638 (SEQ ID NO: 97), were analyzed as described in Example 2. As shown in Table 11, the zeaxanthin levels in T2 aerial tissue from all three T2 events of ME12093 were significantly increased relative to the corresponding amounts in aerial tissues in transgenic control plants. For example, as shown in Table 11, zeaxanthin levels in aerial tissues from T2 events 1\1E12093-02, ME12093-03 and ME12093-04 were increased by 346%, 455% and 132%, respectively, relative to the zeaxanthin levels in transgenic control plants. The standard error for this experiment was calculated based on three replicates for the experimental events and 12 replicates for the transgenic controls. Each replicate represented an extraction of pooled tissues from four individual plants. Zeaxanthin levels in aerial tissues from the T3 events ME12093-02 were increased by 42% relative to the zeaxanthin levels in transgenic control plants.

[0222] There were no observable or statistically significant differences between T2 ME12093 events and control plants in germination, onset of flowering, rosette area, seed yield, and general morphology/architecture.

TABLE 12
ζ-Carotene Increase (Fold Increase)
in ME12093 T₂ and T₃ Generations

| | ME12093-02 | ME12093-03 | ME12093-04 | Control |
|---|---|---|---|---|
| T₂ | 4.46 ± 0.60 | 5.55 ± 0.64 | 2.32 ± 0.38 | 1.00 ± 0.25 |
| p-value | p < 0.01 | p < 0.01 | p < 0.01 | N/A |
| T₃ | 1.42 ± 0.27 | 0.79 ± 0.05 | 1.09 ± 0.05 | 1.00 ± 0.25 |
| p-value | 0.05 | 0.14 | 0.7 | N/A |

*p-values were calculated using a Student's t-test

### Example 10

### Analysis of Transgenic Tomatoes for Carotenoids, Phytosterols, and Tocopherols

[0223] Transgenic tomato plants were generated using the Microtom variety as the recipient line. Each transgenic plant line contained a construct comprising a CaMV 35S promoter operably linked to either Ceres Clone 34553 (SEQ ID NO: 79); Ceres Clone 968026 (SEQ ID NO: 90); Ceres Clone 316638 (SEQ ID NO: 97); or Ceres Clone 13930 (SEQ ID NO: 103).

[0224] Explants of cotyledons from seven to nine day old seedlings were transformed using an Agrobacterium-mediated transformation method essentially as described in Park et al., J. Plant Physiol., 160:1253-1257 (2003). Transformants were selected using a bialophos resistance gene as a selectable marker and selecting on a bialophos containing medium. After selection for transformed tissues, plants were regenerated in a greenhouse and fruit tissues were analyzed for carotenoids, phytosterols, and tocopherols.

[0225] Tomato fruits were quartered, frozen in liquid nitrogen, and lyophilized for seven days. The lyophilized tissue was ground into a fine powder, and 30 mg±3 mg of ground tissue were extracted with 1.50 mL of a 4:3 mixture of ethanol and hexane containing 0.05% w/v butylatedhydroxy toluene. Sixty μL of a solution containing 1 μg/μL of trans-crocetin in ethanol was added as an internal standard. The mixture was mixed by inversion on an orbital shaker for 45 minutes at 4° C. in the dark. Care was taken not to expose the extract to heat or light. The extract was decanted into a syringe and filtered through a 0.22 micron filter into an amber LC-MS vial. The extract was analyzed for carotenoid content using a Waters 2795 Alliance system with a 996 PDA Detector, a Micromass ZMD single quadrupole mass spectrometer, and an atmospheric pressure chemical ionization probe (Waters Corp., Milford, Mass.). Separation of molecules was accomplished using a Luna C₁₈(2) 4.6×150 mm column (Phenomenex, Torrance, Calif.). Carotenoid compounds were identified based on spectral characteristics and comparison to reference standards and published retention times.

[0226] To analyze phytosterol and tocopherol contents, 30 mg±3 mg of ground tissue per sample were placed into a 2 mL Eppendorf tube, and 1.25 mL of ethyl acetate were added to the tube along with 20 μL of a solution containing 1 mg/mL of 19-OH cholesterol in ethyl acetate. The samples were incubated at 70° C. in a heat block for 30 minutes, during which time they were vortexed every five minutes for ten seconds. The samples were then centrifuged at 14,000 g for five minutes, and the extracts were transferred to a 1.5 mL autosampler vial and dried in a Savant SpeedVac for three hours using cryovac pumping. Each dried extract was resuspended in 80 μL of pyridine, sonicated to ensure complete resuspension of the crystals, and incubated for 90 minutes at 25° C. while shaking continuously. After adding 120 μL of MSTFA (Sigma-Aldrich, Saint Louis, Mo.) to each sample, the samples were incubated at 37° C. for 30 minutes and then at room temperature for 120 minutes. Each sample was analyzed for phytosterol and tocopherol content using a QP-2010 GC-MS instrument (Shimadzu Scientific Instruments, Columbia, Md.) with a Varian FactorFour™ column (30 m×0.25 mm×0.25 μm film thickness with 10 m integrated guard column; Varian, Inc., Palo Alto, Calif.). Data were analyzed using the Shimadzu GC-MS Solutions program. Phytosterols and tocopherols were identified by means of retention time standards and mass spectral libraries. Target peak areas were integrated and normalized with respect to the internal standard and the initial weight of the sample. The experimental samples were normalized with respect to the control to obtain normalized response factors. Calibration curves were used for absolute quantitation. Results of the analyses of tomato fruit for carotenoid, phytosterol, and/or tocopherol contents are presented in Table 13.

TABLE 13
Modulation of carotenoid, phytosterol, and/or tocopherol levels
in tomatoes transformed with carotenoid-modulating polypeptides

| | | # of Events | |
|---|---|---|---|
| cDNA | Clone | Modulated/# of | Fold-increase or Fold- |
| ID | ID | Events Tested | decrease¹ |
| 23369236 | 34589 | 6/8 | Decrease in carotenoids³ |
| 23419225 | 968026 | 3/10 | 2-4X increase in ζ-carotene |
| | | 1/10 | Decrease in lycopene and |
| | | | carotenes⁵ |
| 23767585 | 316638 | 2/3 | 2X increase in β-carotene |
| | | 1/3 | 2X increase in lycopene |
| 23369276 | 13930 | 6/9 | 2-7X increase in all |
| | | | tocopherols⁶ |
| | | 2/9 | 2X increase in phytosterols⁴ |
| | | 2/9 | 2X increase in triterpenes² |
| | | 1/9 | 2X increase in β-amyrin |
| | | 1/9 | 2X increase in stigmasterol |
| | | 1/9 | 15X increase in squalene |
| | | 1/9 | Decrease in triterpenes² and |
| | | | phytosterols⁴ |

¹Fold-increase or decrease relative to wild-type tomato fruit at the four weeks post-breaker stage.
²Triterpenes include α-amyrin, β-amyrin, lupeol, and cycloartenol.
³Carotenoids include lycopene, β-carotene, δ-carotene, and ζ-carotene.
⁴Phytosterols include three major sterol forms: campesterol, sitosterol, and stigmasterol.
⁵Carotenes include β- and δ-carotene.
⁶Tocopherols include α-, β-, δ-, and γ-tocopherol.

### Example 11

### Determination of Functional Homolog and/or Orthologue Sequences

[0227] A subject sequence was considered a functional homolog or ortholog of a query sequence if the subject and query sequences encoded proteins having a similar function and/or activity. A process known as Reciprocal BLAST (Rivera et al., Proc. Natl. Acad. Sci. USA, 95:6239-6244 (1998)) was used to identify potential functional homolog and/or ortholog sequences from databases consisting of all available public and proprietary peptide sequences, including NR from NCBI and peptide translations from Ceres clones.

[0228] Before starting a Reciprocal BLAST process, a specific query polypeptide was searched against all peptides from its source species using BLAST in order to identify polypeptides having BLAST sequence identity of 80% or greater to the query polypeptide and an alignment length of 85% or greater along the shorter sequence in the alignment. The query polypeptide and any of the aforementioned identified polypeptides were designated as a cluster.

[0229] The BLASTP version 2.0 program from Washington University at Saint Louis, Mo., USA was used to determine BLAST sequence identity and E-value. The BLASTP version 2.0 program includes the following parameters: 1) an E-value cutoff of 1.0e-5; 2) a word size of 5; and 3) the -postsw option. The BLAST sequence identity was calculated based on the alignment of the first BLAST HSP (High-scoring Segment Pairs) of the identified potential functional homolog and/or ortholog sequence with a specific query polypeptide. The number of identically matched residues in the BLAST HSP alignment was divided by the HSP length, and then multiplied by 100 to get the BLAST sequence identity. The HSP length typically included gaps in the alignment, but in some cases gaps were excluded.

[0230] The main Reciprocal BLAST process consists of two rounds of BLAST searches; forward search and reverse search. In the forward search step, a query polypeptide sequence, “polypeptide A,” from source species SA was BLASTed against all protein sequences from a species of interest. Top hits were determined using an E-value cutoff of 10⁻⁵ and a sequence identity cutoff of 35%. Among the top hits, the sequence having the lowest E-value was designated as the best hit, and considered a potential functional homolog or ortholog. Any other top hit that had a sequence identity of 80% or greater to the best hit or to the original query polypeptide was considered a potential functional homolog or ortholog as well. This process was repeated for all species of interest.

[0231] In the reverse search round, the top hits identified in the forward search from all species were BLASTed against all protein sequences from the source species SA. A top hit from the forward search that returned a polypeptide from the aforementioned cluster as its best hit was also considered as a potential functional homolog or ortholog.

[0232] Functional homologs and/or orthologs were identified by manual inspection of potential functional homolog and/or ortholog sequences. Representative functional homologs and/or orthologs for SEQ ID NO: 80, SEQ ID NO: 91, SEQ ID NO: 104, SEQ ID NO: 95, SEQ ID NO: 89, SEQ ID NO: 110, and SEQ ID NO: 98 are shown in FIGS. 1-5, 7 and 8, respectively.

### Example 12

### Determination of Functional Homologs by HMM

[0233] Hidden Markov Models (HMMs) were generated by the program HMMER 2.3.2. To generate each HMM, the default HMMER 2.3.2 program parameters, configured for glocal alignments, were used. An HMM was generated using the sequences shown in FIG. 1 as input. These sequences were fitted to the model and the HMM bit score for each sequence is shown in the Sequence Listing. Additional sequences were fitted to the model, and the HMM bit scores for any such additional sequences are shown in the Sequence Listing. The results indicate that these additional sequences are functional homologs of SEQ ID NO:80. The procedure above was repeated for each of FIGS. 2-9, using the sequences shown in that Figure as input to generate an HMM. The bit score for each sequence is shown in the Sequence Listing and/or in Tables 14-22. Additional sequences were fitted to certain HMMs, and the HMM bit scores for such additional sequences are shown in the Sequence Listing and/or in Tables 14-22. The results indicate that these additional sequences are functional homologs of the sequences used to generate that HMM.

TABLE 14
Bit Scores From HMM Based on Sequences in FIG. 1

| | | SEQ ID | HMM bit |
|---|---|---|---|
| Designation | Species | NO: | score |
| Ceres CLONE ID no. 34553 | Arabidopsis thaliana | 80 | 726.3 |
| Ceres CLONE ID no. 473423 | Glycine max | 81 | 703.4 |
| Ceres CLONE ID no. 614555 | Glycine max | 82 | 565.4 |
| Ceres CLONE ID no. 1329993 | Triticum aestivum | 83 | 413 |
| Ceres CLONE ID no. 258825 | Zea mays | 84 | 504.4 |
| Public GI no. 34903896 | Oryza sativa subsp. japonica | 85 | 490.9 |
| Public GI no. 57900348 | Oryza sativa subsp. japonica | 86 | 461.6 |
| Public GI no. 50906641 | Oryza sativa subsp. japonica | 87 | 571.1 |
| Ceres Annot ID no. 1534144 | Populus balsamifera subsp. | 185 | 671.3 |
| | trichocarpa | | |
| Ceres Annot ID no. 1441679 | Populus balsamifera subsp. | 187 | 498.9 |
| | trichocarpa | | |
| Ceres Annot ID no. 1480659 | Populus balsamifera subsp. | 189 | 535.4 |
| | trichocarpa | | |
| Ceres Annot ID no. 1479838 | Populus balsamifera subsp. | 191 | 481.2 |
| | trichocarpa | | |
| Ceres Annot ID no. 1533308 | Populus balsamifera subsp. | 193 | 299.8 |
| | trichocarpa | | |
| Ceres CLONE ID no. 463380 | Glycine max | 195 | 713.7 |
| Public GI no. 113367174 | Glycine max | 196 | 721.7 |
| Ceres CLONE ID no. 908192 | Triticum aestivum | 198 | 553.7 |
| Public GI no. 125538797 | Oryza sativa subsp. indica | 199 | 587.7 |
| Public GI no. 115435234 | Oryza sativa subsp. japonica | 200 | 418 |
| Public GI no. 115440013 | Oryza sativa subsp. japonica | 201 | 461.6 |
| Public GI no. 125581476 | Oryza sativa subsp. japonica | 202 | 571.4 |
| Public GI no. 115445299 | Oryza sativa subsp. japonica | 203 | 571.1 |

TABLE 15
Bit Scores From HMM Based on Sequences in FIG. 2

| | | SEQ ID | HMM bit |
|---|---|---|---|
| Designation | Species | NO: | score |
| Ceres CLONE ID no. 968026 | Brassica napus | 91 | 465.3 |
| Public GI no. 28466913 | Arabidopsis thaliana | 92 | 460.1 |
| Ceres CLONE ID no. 596510 | Glycine max | 93 | 488 |
| Ceres CLONE ID no. 1832286 | Gossypium hirsutum | 341 | 314.4 |
| Ceres CLONE ID no. 1932920 | Gossypium hirsutum | 343 | 167.4 |
| Ceres ANNOT ID no. 1473516 | Populus balsamifera subsp. | 345 | 344.9 |
| | trichocarpa | | |
| Ceres ANNOT ID no. 1526929 | Populus balsamifera subsp. | 347 | 321.5 |
| | trichocarpa | | |
| Ceres ANNOT ID no. 1474764 | Populus balsamifera subsp. | 349 | 208.2 |
| | trichocarpa | | |
| Ceres ANNOT ID no. 1443270 | Populus balsamifera subsp. | 351 | 192.4 |
| | trichocarpa | | |
| Ceres ANNOT ID no. 1496190 | Populus balsamifera subsp. | 353 | 174.6 |
| | trichocarpa | | |
| Public GI no. 15242000 | Arabidopsis thaliana | 354 | 460.1 |
| Ceres CLONE ID no. 34579 | Arabidopsis thaliana | 356 | 381 |
| Public GI no. 15228338 | Arabidopsis thaliana | 357 | 373.8 |
| Public GI no. 3953599 | Arabidopsis thaliana | 358 | 373 |
| Public GI no. 3323581 | Arabidopsis thaliana | 359 | 373.4 |
| Public GI no. 3953605 | Arabidopsis thaliana | 360 | 354 |
| Public GI no. 15230202 | Arabidopsis thaliana | 361 | 207.8 |
| Ceres CLONE ID no. 1240183 | Glycine max | 363 | 469.7 |
| Ceres CLONE ID no. 775387 | Triticum aestivum | 365 | 128.5 |
| Ceres CLONE ID no. 916238 | Triticum aestivum | 367 | 113.2 |
| Public GI no. 12060388 | Zea mays | 368 | 214.3 |
| Public GI no. 90265238 | Oryza saliva subsp. indica | 369 | 118.1 |
| Public GI no. 115484121 | Oryza saliva subsp. japonica | 370 | 202.2 |
| Public GI no. 87116390 | Oryza saliva subsp. japonica | 371 | 202.1 |

TABLE 16
Bit Scores From HMM Based on Sequences in FIG. 3

| | | SEQ ID | HMM bit |
|---|---|---|---|
| Designation | Species | NO: | score |
| Ceres CLONE ID no. 13930 | Arabidopsis thaliana | 104 | 880.6 |
| Ceres ANNOT ID no. 1455046 | Populus balsamifera subsp. | 106 | 814.6 |
| | trichocarpa | | |
| Ceres ANNOT ID no. 1475265 | Populus balsamifera subsp. | 108 | 939.8 |
| | trichocarpa | | |
| Ceres CLONE ID no. 1842178 | Gossypium hirsutum | 128 | 966.9 |
| Public GI no. 18413971 | Arabidopsis thaliana | 129 | 880.6 |
| Ceres CLONE ID no. 1044646 | Glycine max | 131 | 949.1 |

TABLE 17
Bit Scores From HMM Based on Sequences in FIG. 4

| | | SEQ ID | HMM bit |
|---|---|---|---|
| Designation | Species | NO: | score |
| Ceres CLONE ID no. 34589 | Arabidopsis thaliana | 95 | 560.4 |
| Ceres CLONE ID no. | Brassica napus | 96 | 423.6 |
| 975220 | | | |
| Ceres CLONE ID no. | Gossypium hirsutum | 205 | 716.1 |
| 1973945 | | | |
| Public GI no. 13346188 | Gossypium hirsutum | 206 | 443.3 |
| Ceres ANNOT ID no. | Populus balsamifera subsp. | 208 | 720.2 |
| 1448769 | trichocarpa | | |
| Ceres ANNOT ID no. | Populus balsamifera subsp. | 210 | 732.5 |
| 1501772 | trichocarpa | | |
| Ceres ANNOT ID no. | Populus balsamifera subsp. | 212 | 626.3 |
| 1465830 | trichocarpa | | |
| Public GI no. 15221257 | Arabidopsis thaliana | 213 | 561.3 |
| Ceres CLONE ID no. | Glycine max | 215 | 702.3 |
| 1371146 | | | |
| Public GI no. 110931782 | Glycine max | 216 | 309.1 |
| Ceres CLONE ID no. | Triticum aestivum | 218 | 452.4 |
| 1020930 | | | |
| Ceres CLONE ID no. | Triticum aestivum | 220 | 436.9 |
| 764797 | | | |
| Ceres CLONE ID no. | Zea mays | 222 | 664.7 |
| 325641 | | | |
| Public GI no. 116310449 | Oryza saliva subsp. indica | 223 | 735.4 |
| Public GI no. 115458786 | Oryza saliva subsp. japonica | 224 | 733.2 |

TABLE 18
Bit Scores From HMM Based on Sequence in FIG. 5

| | | SEQ ID | HMM bit |
|---|---|---|---|
| Designation | Species | NO: | score |
| Truncated Version Ceres CLONE ID | Artificial Sequence | 159 | 526.2 |
| 1918241 | | | |
| Truncated Version Ceres annot ID | Artificial Sequence | 161 | 491.6 |
| 1454043 | | | |
| Truncated Version Ceres Clone ID | Artificial Sequence | 163 | 468.5 |
| 1938564 | | | |
| Truncated Version Ceres Annot ID | Artificial Sequence | 165 | 544.2 |
| 1464854 | | | |
| Truncated Version Ceres Annot ID | Artificial Sequence | 167 | 521.1 |
| 1511378 | | | |
| Truncated Version Ceres Annot ID | Artificial Sequence | 169 | 521.1 |
| 1458137 | | | |
| Truncated Version Public GI no. | Artificial Sequence | 170 | 525 |
| 18424254 | | | |
| Truncated Version Ceres Clone ID | Artificial Sequence | 172 | 543.7 |
| 479514 | | | |
| Truncated Version Ceres Clone ID | Artificial Sequence | 174 | 437.9 |
| 1240790 | | | |
| Truncated Version Ceres Clone ID | Artificial Sequence | 176 | 426.4 |
| 942216 | | | |
| Truncated Version Ceres Clone ID | Artificial Sequence | 178 | 406.4 |
| 987194 | | | |
| Truncated Version Ceres Clone ID | Artificial Sequence | 180 | 522.7 |
| 1780447 | | | |
| Truncated Version Ceres Clone ID | Artificial Sequence | 182 | 406.4 |
| 677852 | | | |
| Truncated Version Public GI no. | Artificial Sequence | 183 | 409.9 |
| 115452185 | | | |
| Ceres CLONE ID no. 21863 | Arabidopsis thaliana | 89 | 516.4 |

TABLE 19
Bit Scores from HMM Based on Sequences in FIG. 6

| | | SEQ ID | HMM bit |
|---|---|---|---|
| Designation | Species | NO: | score |
| Ceres CLONE ID no. | Gossypium hirsutum | 133 | 954.7 |
| 1918241 | | | |
| Ceres CLONE ID no. | Gossypium hirsutum | 135 | 639.2 |
| 1938564 | | | |
| Ceres ANNOT ID no. | Populus balsamifera subsp. | 137 | 1045 |
| 1464854 | trichocarpa | | |
| Ceres ANNOT ID no. | Populus balsamifera subsp. | 139 | 922.6 |
| 1511378 | trichocarpa | | |
| Ceres ANNOT ID no. | Populus balsamifera subsp. | 141 | 922.6 |
| 1458137 | trichocarpa | | |
| Ceres ANNOT ID no. | Populus balsamifera subsp. | 143 | 575.5 |
| 1454043 | trichocarpa | | |
| Public GI no. 18424254 | Arabidopsis thaliana | 144 | 1018.8 |
| Ceres CLONE ID no. | Glycine max | 146 | 930.1 |
| 479514 | | | |
| Ceres CLONE ID no. | Glycine max | 148 | 598.7 |
| 1240790 | | | |
| Ceres CLONE ID no. | Triticum aestivum | 150 | 666.2 |
| 942216 | | | |
| Ceres CLONE ID no. | Zea mays | 152 | 662.6 |
| 987194 | | | |
| Ceres CLONE ID no. | Triticum aestivum | 154 | 962 |
| 1780447 | | | |
| Ceres CLONE ID no. | Triticum aestivum | 156 | 664 |
| 677852 | | | |
| Public GI no. 115452185 | Oryza saliva subsp. japonica | 157 | 669.5 |

TABLE 20
Bit Scores from HMM Based on Sequences in FIG. 7

| | | SEQ ID | HMM bit |
|---|---|---|---|
| Designation | Species | NO: | score |
| Ceres CLONE ID no. | Arabidopsis thaliana | 110 | 289.4 |
| 641355 | | | |
| Ceres CLONE ID no. | Gossypium hirsutum | 292 | 174.3 |
| 1849534 | | | |
| Ceres CLONE ID no. | Gossypium hirsutum | 294 | 670.9 |
| 1926437 | | | |
| Ceres ANNOT ID no. | Populus balsamifera subsp. | 296 | 277.3 |
| 1463335 | trichocarpa | | |
| Ceres ANNOT ID no. | Populus balsamifera subsp. | 298 | 193.1 |
| 1463334 | trichocarpa | | |
| Ceres ANNOT ID no. | Populus balsamifera subsp. | 300 | 182.1 |
| 1442765 | trichocarpa | | |
| Ceres ANNOT ID no. | Populus balsamifera subsp. | 302 | 156.8 |
| 1442760 | trichocarpa | | |
| Ceres annot | Populus balsamifera subsp. | 304 | 236.1 |
| ID no. 1446840 | trichocarpa | | |
| Public GI no. 42565130 | Arabidopsis thaliana | 305 | 183.5 |
| Public GI no. 15239863 | Arabidopsis thaliana | 306 | 258.4 |
| Public GI no. 116831575 | Arabidopsis thaliana | 307 | 258.4 |
| Public GI no. 48479320 | Arabidopsis thaliana | 308 | 259.9 |
| Public GI no. 145338854 | Arabidopsis thaliana | 309 | 187.1 |
| Public GI no. 48479286 | Arabidopsis thaliana | 310 | 164.9 |
| Public GI no. 21264420 | Arabidopsis thaliana | 311 | 310.5 |
| Public GI no. 25350257 | Arabidopsis thaliana | 312 | 267.8 |
| Public GI no. 25350258 | Arabidopsis thaliana | 313 | 307.7 |
| Ceres CLONE ID no. 6042 | Arabidopsis thaliana | 315 | 307.5 |
| Public GI no. 18414897 | Arabidopsis thaliana | 316 | 180.4 |
| Ceres CLONE ID no. | Brassica napus | 318 | 459.7 |
| 965028 | | | |
| Ceres CLONE ID no. | Brassica napus | 320 | 500.3 |
| 1080500 | | | |
| Ceres CLONE ID no. | Glycine max | 322 | 285 |
| 641355 | | | |
| Ceres CLONE ID no. | Triticum aestivum | 324 | 116.9 |
| 907605 | | | |
| Ceres CLONE ID no. | Triticum aestivum | 326 | 674.4 |
| 555364 | | | |
| Ceres CLONE ID no. | Triticum aestivum | 328 | 641 |
| 569593 | | | |
| Public GI no. 125547473 | Oryza saliva subsp. indica | 329 | 144.1 |
| Public GI no. 125562586 | Oryza saliva subsp. indica | 330 | 155.3 |
| Public GI no. 31432356 | Oryza saliva subsp. japonica | 331 | 217.7 |
| Public GI no. 125574952 | Oryza saliva subsp. japonica | 332 | 217.7 |
| Public GI no. 115450749 | Oryza saliva subsp. japonica | 333 | 150.6 |
| Public GI no. 125584936 | Oryza saliva subsp. japonica | 334 | 145.3 |
| Public GI no. 115457454 | Oryza saliva subsp. japonica | 335 | 146.5 |
| Public GI no. 52076099 | Oryza saliva subsp. japonica | 336 | 152.6 |
| Public GI no. 28071302 | Oryza saliva subsp. japonica | 337 | 153.3 |
| Public GI no. 115439973 | Oryza saliva subsp. japonica | 338 | 91.6 |
| Public GI no. 57899163 | Oryza saliva subsp. japonica | 339 | 86.9 |

TABLE 21
Bit Scores from HMM Based on Sequences in FIG. 8

| | | SEQ ID | HMM bit |
|---|---|---|---|
| Designation | Species | NO: | score |
| Ceres CLONE ID no. 973476 | Brassica napus | 100 | 219.1 |
| Ceres CLONE ID no. 911175 | Triticum aestivum | 101 | 132.7 |
| Truncated Version Ceres CLONE ID | Artificial Sequence | 259 | 226.3 |
| 1929841 | | | |
| Truncated Version Ceres annot ID 1470444 | Artificial Sequence | 261 | 223.9 |
| Truncated Version Public GI no. 15237901 | Artificial Sequence | 262 | 225.6 |
| Truncated Version Ceres CLONE ID | Artificial Sequence | 264 | 225.6 |
| 26844 | | | |
| Truncated Version Public GI no. 15228464 | Artificial Sequence | 265 | 221.2 |
| Truncated Version Ceres CLONE ID | Artificial Sequence | 267 | 221.2 |
| 124385 | | | |
| Truncated Version Ceres CLONE ID | Artificial Sequence | 269 | 224.2 |
| 707855 | | | |
| Truncated Version Ceres CLONE ID | Artificial Sequence | 271 | 225.2 |
| 757222 | | | |
| Truncated Version Ceres CLONE ID | Artificial Sequence | 273 | 224.5 |
| 1545342 | | | |
| Truncated Version Ceres CLONE ID | Artificial Sequence | 275 | 224.2 |
| 275632 | | | |
| Truncated Version Ceres CLONE ID | Artificial Sequence | 277 | 215.6 |
| 306269 | | | |
| Truncated Version Ceres CLONE ID | Artificial Sequence | 279 | 202.9 |
| 295292 | | | |
| Truncated Version Ceres CLONE ID | Artificial Sequence | 281 | 224.2 |
| 1860083 | | | |
| Truncated Version Public GI no. | Artificial Sequence | 282 | 205.4 |
| 125537931 | | | |
| Truncated Version Public GI no. 41052966 | Artificial Sequence | 283 | 224.5 |
| Truncated Version Public GI no. | Artificial Sequence | 284 | 224.5 |
| 115448099 | | | |
| Truncated Version Public GI no. | Artificial Sequence | 285 | 224.2 |
| 115483682 | | | |
| Truncated Version Public GI no. 78709067 | Artificial Sequence | 286 | 224.2 |
| Truncated Version Public GI no. | Artificial Sequence | 287 | 224.2 |
| 110289664 | | | |
| Truncated Version Public GI no. | Artificial Sequence | 288 | 205.4 |
| 115443985 | | | |
| Truncated Version Public GI no. | Artificial Sequence | 289 | 205.4 |
| 125580669 | | | |
| Truncated Version Public GI no. 7248402 | Artificial Sequence | 290 | 179.7 |
| Ceres CLONE ID no. 316638 | Zea mays | 98 | 112.3 |

TABLE 22
Bit Scores from HMM Based on Sequences in FIG. 9

| | | SEQ ID | HMM bit |
|---|---|---|---|
| Designation | Species | NO: | score |
| Public GI no. 78709067 | Oryza saliva subsp. japonica | 99 | 231.5 |
| Public GI no. 1184987 | Nicotiana tabacum | 102 | 70.5 |
| Ceres CLONE ID no. 1929841 | Gossypium hirsutum | 226 | 504.5 |
| Ceres ANNOT ID no. | Populus balsamifera subsp. | 228 | 307.4 |
| 1470444 | trichocarpa | | |
| Public GI no. 15237901 | Arabidopsis thaliana | 229 | 496.7 |
| Ceres CLONE ID no. 26844 | Arabidopsis thaliana | 231 | 496.7 |
| Public GI no. 15228464 | Arabidopsis thaliana | 232 | 484.2 |
| Ceres CLONE ID no. 124385 | Arabidopsis thaliana | 234 | 484.2 |
| Ceres CLONE ID no. 707855 | Glycine max | 236 | 503.1 |
| Ceres CLONE ID no. 757222 | Triticum aestivum | 238 | 395.2 |
| Ceres CLONE ID no. 1545342 | Zea mays | 240 | 483.8 |
| Ceres CLONE ID no. 275632 | Zea mays | 242 | 481.3 |
| Ceres CLONE ID no. 306269 | Zea mays | 244 | 486.8 |
| Ceres CLONE ID no. 295292 | Zea mays | 246 | 336.3 |
| Ceres CLONE ID no. 1860083 | Panicum virgatum | 248 | 263.6 |
| Public GI no. 125537931 | Oryza sativa subsp. indica | 249 | 296.4 |
| Public GI no. 41052966 | Oryza sativa subsp. japonica | 250 | 489.9 |
| Public GI no. 115448099 | Oryza sativa subsp. japonica | 251 | 195.7 |
| Public GI no. 115483682 | Oryza sativa subsp. japonica | 252 | 474.5 |
| Public GI no. 78709066 | Oryza sativa subsp. japonica | 253 | 305.3 |
| Public GI no. 110289664 | Oryza sativa subsp. japonica | 254 | 231.5 |
| Public GI no. 115443985 | Oryza sativa subsp. japonica | 255 | 410.5 |
| Public GI no. 125580669 | Oryza sativa subsp. japonica | 256 | 364.7 |
| Public GI no. 7248402 | Oryza sativa subsp. japonica | 257 | 368.6 |

### OTHER EMBODIMENTS

[0234] It is to be understood that while the invention has been described in conjunction with the detailed description thereof, the foregoing description is intended to illustrate and not limit the scope of the invention, which is defined by the scope of the appended claims. Other aspects, advantages, and modifications are within the scope of the following claims.

1. A method of modulating the level of a carotenoid in a plant, said method comprising introducing into a plant cell an exogenous nucleic acid comprising a regulatory region operably linked to a nucleotide sequence encoding a polypeptide, wherein the HMM bit score of the amino acid sequence of said polypeptide is greater than 50, said HMM based on the amino acid sequences depicted in one of FIGS. 1-9, and wherein a tissue of a plant produced from said plant cell has a difference in the level of a carotenoid as compared to the corresponding level in tissue of a control plant that does not comprise said exogenous nucleic acid.

2. A method of modulating the level of a carotenoid in a plant, said method comprising introducing into a plant cell an exogenous nucleic acid comprising a regulatory region operably linked to a nucleotide sequence encoding a polypeptide having 80 percent or greater sequence identity to an amino acid sequence selected from the group consisting of SEQ ID NOs: 80-87, SEQ ID NO: 89, SEQ ID NOs: 91-93, SEQ ID NO: 95, SEQ ID NO: 96, SEQ ID NO: 98; SEQ ID NO: 99, SEQ ID NO: 100, SEQ ID NO:101, SEQ ID NO:102, SEQ ID NO: 104, SEQ ID NO:106, SEQ ID NO:108, SEQ ID NO: 110, SEQ ID NO: 128, SEQ ID NO: 129, SEQ ID NO: 131; SEQ ID NO: 133, SEQ ID NO:135, SEQ ID NO:137, SEQ ID NO:139, SEQ ID NO:141, SEQ ID NO:143, SEQ ID NO:144, SEQ ID NO:146, SEQ ID NO:148, SEQ ID NO:150, SEQ ID NO:152, SEQ ID NO:154, SEQ ID NO:156, SEQ ID NO:157; SEQ ID NO: 159, SEQ ID NO: 161, SEQ ID NO: 163, SEQ ID NO: 165, SEQ ID NO: 167, SEQ ID NO: 169, SEQ ID NO: 170, SEQ ID NO: 172, SEQ ID NO: 174, SEQ ID NO: 176, SEQ ID NO: 178, SEQ ID NO: SEQ ID NO: 180, SEQ ID NO: 182, SEQ ID NO: 183, SEQ ID NO: 185, SEQ ID NO: 187, SEQ ID NO: 189, SEQ ID NO: 191, SEQ ID NO: 193, SEQ ID NO: 195, SEQ ID NO: 196, SEQ ID NO: 198, SEQ ID NOs: 199-203, SEQ ID NO: 205, SEQ ID NO: 206, SEQ ID NO: 208, SEQ ID NO: 210, SEQ ID NO: 212, SEQ ID NO: 213, SEQ ID NO: 215, SEQ ID NO: 216, SEQ ID NO: 218, SEQ ID NO: 220, SEQ ID NO: 222, SEQ ID NO: 223, SEQ ID NO: 224, SEQ ID NO:226, SEQ ID NO:228, SEQ ID NO:229, SEQ ID NO:231, SEQ ID NO:232, SEQ ID NO:234, SEQ ID NO:236, SEQ ID NO:238, SEQ ID NO:240, SEQ ID NO:242, SEQ ID NO:244, SEQ ID NO:246, SEQ ID NOs:248-257, SEQ ID NO:259, SEQ ID NO:261, SEQ ID NO:262, SEQ ID NO:264, SEQ ID NO:265, SEQ ID NO:267, SEQ ID NO:269, SEQ ID NO:271, SEQ ID NO:273, SEQ ID NO:275, SEQ ID NO:277, SEQ ID NO:279, SEQ ID NOs:281-290, SEQ ID NO:292, SEQ ID NO:294, SEQ ID NO:296, SEQ ID NO:298, SEQ ID NO:300, SEQ ID NO:302, SEQ ID NOs:304-313, SEQ ID NO:315, SEQ ID NO:316, SEQ ID NO:318, SEQ ID NO:320, SEQ ID NO:322, SEQ ID NO:324, SEQ ID NO:326, SEQ ID NOs:328-339, SEQ ID NO:341, SEQ ID NO:343, SEQ ID NO:345, SEQ ID NO:347, SEQ ID NO:349, SEQ ID NO:351, SEQ ID NO:353, SEQ ID NO:354, SEQ ID NOs:356-361, SEQ ID NO:363, SEQ ID NO:365, and SEQ ID NOs:367-371, wherein a tissue of a plant produced from said plant cell has a difference in the level of a carotenoid as compared to the corresponding level in tissue of a control plant that does not comprise said exogenous nucleic acid.

3. A method of producing a plant tissue, said method comprising growing a plant cell comprising an exogenous nucleic acid, said exogenous nucleic acid comprising a regulatory region operably linked to a nucleotide sequence encoding a polypeptide, wherein the HMM bit score of the amino acid sequence of said polypeptide is greater than 50, said HMM based on the amino acid sequences depicted in one of FIGS. 1-9, and wherein a tissue of a plant produced from said plant cell has a difference in the level of a carotenoid as compared to the corresponding level in tissue of a control plant that does not comprise said exogenous nucleic acid.

4. The method of claim 1, wherein said nucleotide sequence encodes a polypeptide, the HMM bit score of the amino acid sequence of said polypeptide being greater than 50, said HMM based on the amino acid sequences depicted in FIG. 7.

5. The method of claim 4, wherein said nucleotide sequence encodes a polypeptide comprising an amino acid sequence corresponding to SEQ ID NO: 110.

6. A method of modulating the level of a carotenoid in a plant, said method comprising introducing into a plant cell an exogenous nucleic acid comprising a regulatory region operably linked to a nucleotide sequence having 80 percent or greater sequence identity to a nucleotide sequence selected from the group consisting of SEQ ID NO: 94, SEQ ID NO: 103, SEQ ID NO: 107, SEQ ID NO: 109, SEQ ID NO: 127, SEQ ID NO: 130, SEQ ID NO: 132, SEQ ID NO: 134, SEQ ID NO: 136, SEQ ID NO: 138, SEQ ID NO: 140, SEQ ID NO: 142, SEQ ID NO: 145, SEQ ID NO: 147, SEQ ID NO: 149, SEQ ID NO: 151, SEQ ID NO: 153, SEQ ID NO: 155, SEQ ID NO: 158, SEQ ID NO: 160, SEQ ID NO: 162, SEQ ID NO: 164, SEQ ID NO: 166, SEQ ID NO: 168, SEQ ID NO: 171, SEQ ID NO: 173, SEQ ID NO: 175, SEQ ID NO: 177, SEQ ID NO: 179, SEQ ID NO: 181, SEQ ID NO: 184, SEQ ID NO: 186, SEQ ID NO: 188, SEQ ID NO: 190, SEQ ID NO: 192, SEQ ID NO: 194, SEQ ID NO: 197, SEQ ID NO: 204, SEQ ID NO: 207, SEQ ID NO: 209, SEQ ID NO: 211, SEQ ID NO: 214, SEQ ID NO: 217, SEQ ID NO: 219, SEQ ID NO: 221, SEQ ID NO: 225, SEQ ID NO: 227, SEQ ID NO: 230, SEQ ID NO: 233, SEQ ID NO: 235, SEQ ID NO: 237, SEQ ID NO: 239, SEQ ID NO: 241, SEQ ID NO: 243, SEQ ID NO: 245, SEQ ID NO: 247, SEQ ID NO: 258, SEQ ID NO: 260, SEQ ID NO: 263, SEQ ID NO: 266, SEQ ID NO: 268, SEQ ID NO: 270, SEQ ID NO: 272, SEQ ID NO: 274, SEQ ID NO: 276, SEQ ID NO: 278, SEQ ID NO: 280, SEQ ID NO: 291, SEQ ID NO: 293, SEQ ID NO: 295, SEQ ID NO: 297, SEQ ID NO: 299, SEQ ID NO: 301, SEQ ID NO: 303, SEQ ID NO: 314, SEQ ID NO: 317, SEQ ID NO: 319, SEQ ID NO: 321, SEQ ID NO: 323, SEQ ID NO: 325, SEQ ID NO: 327, SEQ ID NO: 340, SEQ ID NO: 342, SEQ ID NO: 344, SEQ ID NO: 346, SEQ ID NO: 348, SEQ ID NO: 350, SEQ ID NO: 352, SEQ ID NO: 355, SEQ ID NO: 362, SEQ ID NO: 364, SEQ ID NO: 366, SEQ ID NO: 372, SEQ ID NO: 374, SEQ ID NO: 375, SEQ ID NO: 376, SEQ ID NO: 377, SEQ ID NO: 378, SEQ ID NO: 379, wherein a tissue of a plant produced from said plant cell has a difference in the level of a carotenoid as compared to the corresponding level in tissue of a control plant that does not comprise said nucleic acid.

7. A method of producing a plant tissue, said method comprising growing a plant cell comprising an exogenous nucleic acid, said exogenous nucleic acid comprising a regulatory region operably linked to a nucleotide sequence having 80 percent or greater sequence identity to a nucleotide sequence selected from the group consisting of SEQ ID NO: 94, SEQ ID NO: 103, SEQ ID NO: 107, SEQ ID NO: 109, SEQ ID NO: 127, SEQ ID NO: 130, SEQ ID NO: 132, SEQ ID NO: 134, SEQ ID NO: 136, SEQ ID NO: 138, SEQ ID NO: 140, SEQ ID NO: 142, SEQ ID NO: 145, SEQ ID NO: 147, SEQ ID NO: 149, SEQ ID NO: 151, SEQ ID NO: 153, SEQ ID NO: 155, SEQ ID NO: 158, SEQ ID NO: 160, SEQ ID NO: 162, SEQ ID NO: 164, SEQ ID NO: 166, SEQ ID NO: 168, SEQ ID NO: 171, SEQ ID NO: 173, SEQ ID NO: 175, SEQ ID NO: 177, SEQ ID NO: 179, SEQ ID NO: 181, SEQ ID NO: 184, SEQ ID NO: 186, SEQ ID NO: 188, SEQ ID NO: 190, SEQ ID NO: 192, SEQ ID NO: 194, SEQ ID NO: 197, SEQ ID NO: 204, SEQ ID NO: 207, SEQ ID NO: 209, SEQ ID NO: 211, SEQ ID NO: 214, SEQ ID NO: 217, SEQ ID NO: 219, SEQ ID NO: 221, SEQ ID NO: 225, SEQ ID NO: 227, SEQ ID NO: 230, SEQ ID NO: 233, SEQ ID NO: 235, SEQ ID NO: 237, SEQ ID NO: 239, SEQ ID NO: 241, SEQ ID NO: 243, SEQ ID NO: 245, SEQ ID NO: 247, SEQ ID NO: 258, SEQ ID NO: 260, SEQ ID NO: 263, SEQ ID NO: 266, SEQ ID NO: 268, SEQ ID NO: 270, SEQ ID NO: 272, SEQ ID NO: 274, SEQ ID NO: 276, SEQ ID NO: 278, SEQ ID NO: 280, SEQ ID NO: 291, SEQ ID NO: 293, SEQ ID NO: 295, SEQ ID NO: 297, SEQ ID NO: 299, SEQ ID NO: 301, SEQ ID NO: 303, SEQ ID NO: 314, SEQ ID NO: 317, SEQ ID NO: 319, SEQ ID NO: 321, SEQ ID NO: 323, SEQ ID NO: 325, SEQ ID NO: 327, SEQ ID NO: 340, SEQ ID NO: 342, SEQ ID NO: 344, SEQ ID NO: 346, SEQ ID NO: 348, SEQ ID NO: 350, SEQ ID NO: 352, SEQ ID NO: 355, SEQ ID NO: 362, SEQ ID NO: 364, SEQ ID NO: 366, SEQ ID NO: 372, SEQ ID NO: 374, SEQ ID NO: 375, SEQ ID NO: 376, SEQ ID NO: 377, SEQ ID NO: 378, SEQ ID NO: 379, wherein a tissue of a plant produced from said plant cell has a difference in the level of a carotenoid as compared to the corresponding level in tissue of a control plant that does not comprise said nucleic acid.

8. The method of claim 6, wherein said nucleotide sequence encodes a polypeptide, the HMM bit score of the amino acid sequence of said polypeptide being greater than 50, said HMM based on the amino acid sequences depicted in FIG. 7.

9. The method of claim 8, wherein said nucleotide sequence encodes a polypeptide comprising the amino acid sequence set forth in SEQ ID NO: 110.

10. The method of claim 6, wherein said nucleotide sequence has a sequence identity that is 85 percent or greater.

11. The method of claim 1, wherein said nucleotide sequence encodes a polypeptide comprising an amino acid sequence selected from the group consisting of SEQ ID NO: 80, SEQ ID NO: 89, SEQ ID NO: 91, SEQ ID NO: 95, SEQ ID NO: 98, SEQ ID NO: 104, SEQ ID NO: 144 and SEQ ID NO: 240.

12. The method of claim 1, wherein said difference is an increase in the level of a carotenoid.

13. The method of claim 1, wherein said carotenoid is selected from the group consisting of phytoene, ζ-carotene, lycopene, δ-carotene, α-carotene, lutein, gamma-carotene, cis-β-carotene, trans-β-carotene, zeaxanthin, antheraxanthin, astaxanthin, bixin, capsanthin, fucoxanthin, and violaxanthin.

14-16. (canceled)

17. The method of claim 1, wherein said plant is a dicot.

18. The method of claim 17, wherein said plant is a member of the genus Lycopersicon, Lactuca, Glycine, Gossypium, or Brassica.

19. The method of claim 1, wherein said plant is a monocot.

20. The method of claim 19, wherein said plant is a member of the genus Triticum, Zea, Oryza, or Musa.

21-44. (canceled)

45. An isolated nucleic acid molecule comprising a nucleotide sequence having 95% or greater sequence identity to the nucleotide sequence selected from the group consisting of SEQ ID NO:105 and SEQ ID NO:107.

46. An isolated nucleic acid comprising a nucleotide sequence encoding a polypeptide having 80% or greater sequence identity to the amino acid sequence selected from the group consisting of SEQ ID NO:106 and SEQ ID NO:108.

The application's sequence listing, which the Patent Office published only in electronic form, follows.

SEQUENCE LISTING (379 sequences)

SEQ ID NO: 1 - DNA, 1823 bp, Arabidopsis thaliana
  misc_feature (1)..(1823): Ceres Promoter 21876
gtctcttaaaaaggatgaacaaacacgaaactggtggattatacaaatgtcgccttatacatatatcggttattggccaaaagagctattttaccttatggataatggtgctactatggttggagttggaggtgtagttcaggcttcaccttctggtttaagccctccaatgggtaatggtaaatttccggcaaaaggtcctttgagatcagccatgttttccaatgttgaggtcttatattccaagtatgagaaaggtaaaataaatgcgtttcctatagtggagttgctagatagtagtagatgttatgggctacgaattggtaagagagttcgattttggactagtccactcggatactttttcaattatggtggtcctggaggaatctcttgtggagtttgatatttgcgagtataatctttgaacttgtgtagattgtacccaaaaccgaaaacatatcctatataaatttcattatgagagtaaaattgtttgttttatgtatcatttctcaactgtgattgagttgactattgaaaacatatcttagataagtttcgttatgagagttaatgatgattgatgacatacacactcctttatgatggtgattcaacgttttggagaaaatttatttataatctctcataaattctccgttattagttgaataaaatcttaaatgtctcctttaaccatagcaaaccaacttaaaaatttagattttaaagttaagatggatattgtgattcaacgattaattatcgtaatgcatattgattatgtaaaataaaatctaactaccggaatttattcaataactccattgtgtgactgcatttaaatatatgttttatgtcccattaattaggctgtaatttcgatttatcaatttatatactagtattaatttaattccatagatttatcaaagccaactcatgacggctagggttttccgtcaccttttcgatcatcaagagagtttttttataaaaaaatttatacaattatacaatttcttaaccaaacaacacataattataagctatttaacatttcaaattgaaaaaaaaaatgtatgagaattttgtggatccatttttgtaattctttgttgggtaaattcacaaccaaaaaaatagaaaggcccaaaacgcgtaagggcaaattagtaaaagtagaaccacaaagagaaagcgaaaaccctagacacctcgtagctataagtaccctcgagtcgaccaggattagggtgcgctctcatatttctcacattttcgtagccgcaagactcctttcagattcttacttgcaggttagatattttctctctttagtgtctccgatcttcatcttcttatgattattgtagctgtttagggtttagattcttagttttagctctatattgactgtgattatcgcttattctttgctgttgttatactgcttttgattctctagctttagatccgtttactcgtcgatcaatattgttcctattgagtctgatgtataatcctctgattaattgatagcgtttagttttgatatcgtcttcgcatgttttttatcatgtcgatctgtatctgctctggttatagttgattctgatgtatttggttggtgatgttccttagatttgatatacctgttgtctcgtggtttgatatgatagctcaactggtgatatgtggttttgtttcagtggatctgtgtttgattatattgttgacgttttggttgttgtatggttgatggttgatgtatttttgttgattctgatgtttcgatttttgtttttgttttgacagct

SEQ ID NO: 2 - DNA, 1000 bp, Arabidopsis thaliana
  misc_feature (1)..(1000): Ceres Promoter PT0668
atagagttttactatgcttttggaatctttcttctaatgtgccaactacagagaaatacatgtattaccactaggaatcggaccatatcatagatatcaggattagataactagttctcgtcgctatcacttcgcattaagttctagtaattgttaaagattctaattttttactaaacaaaaactaaatcaacatcaaatatgcaaagtgtgtgttgtccacacaagtgactcaaagtatacgcaggtgggattggaccatattattgcaaatcgtttccgaaccactcatatttctttttttctctcctttttttatccggagaattatggaaccacttcatttcaacttcaaaactaattttttggttcagtgatcaaatacaaaaaaaaaaaaaaagttatagatattaaatagaaaactattccaatcttaaaaatacaaatgaaaccataattttaatttatacaaaactatttaattagctaagggttgtcttaacgtttagaaaataaaaaattatgattgtctgtttaaaattacaatgaatgaataaaaaaaatatgcaatgaatgaaagaataaattttgtacatccgatagaatgagaaaatgaattttgtacaaaccactcaagaattcaaaacaattgtcaaagttttcttctcagccgtgtgtcctcctctcctagccgccacatctcacacactaatgctaaccacgcgatgtaaccgtaagcgctgagtttttgcatttcagatttcacttccaccaaacaaaactcgccacgtcatcaatacgaatcattccgtataaacgtctagattctttacagcctacaatgttctcttctttggtcggccattatttaacgctttgaacctaaatctagcccagccaacgaagaagacgaagcaaatccaaaccaaagttctccattttcgtagcttctttaagctttttcagtatcatagagacacttttttttttttgattagaa

SEQ ID NO: 3 - DNA, 1000 bp, Arabidopsis thaliana
  misc_feature (1)..(1000): Ceres Promoter PT0535
ttagtgaaattatgacattaagtaaggttttcttagttagctaatgtatggctattcaattgttatgttaggctattttagttagtatatgaatttaggcagtctatgcaaatgatttcgttttcattttttcatatgtaaacatcaagatcaagtaacgccattcgagttgatattttttttttaaattagtgtgtgtaaattttggaccgcttatttgagtttgctaatgaagttgcatatatattacgttaaaccataggcaaactaatttgaaacatccgattcgatttcctgtaatttttcttggttaattgaccaaaatcaagatcttcagaaataaaataaaagacgaaagaaagctgtcgcaaagcagattgtgttaaaaaaaagtggattgggctcaaacgcaacttgtccagcccgtgacaattaccctatacgcaagtaagagtaacgtatcactggcaaaagttggtattagttacgatatctttgtcatgggggcatgcatgggcatggcttaagagttaagccttaagaagagtcccacactcgtgactctcatgatcacttgttgtttcttacgggcaaatacatttaactttattcttcatttattcacctatattcttttggataataacttttctctatataaaataacaaacatcgtacgtttcatttatttacaacaagcgatgagaattaaaaggagaccttaattgatgatactcttcttttctctcggttacaacgggattattacagataatgataatctatatggatgctgacgtggaaaaacaaaatttggtgaaacacgtcaattaagcacgacttttccatggctagtggctaagatcgtttcatcacatggctatatcatataatacttggatgaattcaaaataaacgactgagaaaatgtccacgtcacggcgcaccgctttggacttaagtctcctataataaatacaacaccaaacattgcattcca

SEQ ID NO: 4 - DNA, 999 bp, Arabidopsis thaliana
  misc_feature (1)..(999): Ceres Promoter PT0585
tgaagtcatttaatatgagtttgacattaggtaaacctaatctatgagattatagaatgtagcaaaactatcaatgtttcttttccaaaatattttgtggtttttctttttggttcattatgttttgttatttgtgaattattttaatatgaagtaattatattgattttatatgatatacatattattttgatataaaatttaacacttatccattaaaatagcatgggcataatcaaaatcgggactattacgatgaaaaagatagttaaattgtatgataaaataaaatgtgtaagattaaaattttgggttttagaaaattactaaacaaaatatagacaaagtatgttgactattatttaaaatttaaatatcatcaataagatatagttaaagtcattaagtgtatagcaaaatgaaaattctaagattaaaattcgattaaaattttttttactaaattaaatatttaaaaatagggattatcatttactatttacaattctaatatcatgggtaaaaattgataactttttttaaacccgcctatctaggtgggcctaacctagtttactaattactatatgattaacttattaccacttttacttcttcttttttggtcaaattactttattgttttttataaagtcaaattactctttgcattgtaaataatagtagtaactaaaatcttaaaacaaaatattcaacctttcccattattggaatggtaatgtcttcaacaccattgaccaacgttaaggaatgtcttttaatatttttggaacctaaatgctaatactgtataccacaatcacttatgagtattgaagttgagatagaggaggtacaaggagaccttatctgcagaagacaaaaagccatttttagcaaaactaaagaaagaaaaaagattgaaacacaaatatgcgccactcgtagtccacccctatctctttggcaaaagccacttcactctttttccctttttat

SEQ ID NO: 5 - DNA, 1000 bp, Arabidopsis thaliana
  misc_feature (1)..(1000): Ceres Promoter PT0613
ttaatactaacattgtagaaagccacaaaaaagaaattgaaatgtgagtagatgctgagtcagaggtttggtcaatacacaacagctaattgagataatattatacacgtcacgatgacttgttttttctcctcccaacttgttaatttctttattcttaaaattaaaccatcgcaaaaacagaagaacacagctgtttttctcgactcccaatttctattttgctgctaaggacatttcatttcattatttcccaattcaggactccttagattttcctaaatttgttttcctaacttgctctctctcattctaacattttctcatttttttagattatcttgtactttttagtagattattttatcaggttttacaaacatacattgacattctaaaaagggcttctaaaaattcagtgtggaatgctgatatactaaaaaaaggtcatgcaaaattatctacgatttatctaaaattagataatttgccatatataactattaactaataatcgatcctttgattttttgtttagataaaacgaaacagctatatcttttttttttgttatcggattttaatcgaataaaagctgaaaaataacagttatatcttcttcttttttaactaatgaaacagttatatcttaaacaaacaacagaaacagtaaaatattaatgcaaatccgcgtcaagagataaattttaacaaactaataacaattgagataagattagcgcaaaagaaactctaattttagagcgtgtaaacacaaacacgtcttgaaagtaaacgtgaattacacgcttctaaaacgagcgtgagttttggttataacgaagatacggtgaagtgtgacacctttctacgttaatttcagtttgaggacacaactcaagttatgtttgatatctaaggacttgcactgtctccaaatctgcaggaaggactttttgattggatcaatataaataccatctccattctcgtctccttc

SEQ ID NO: 6 - DNA, 351 bp, Arabidopsis thaliana
  misc_feature (1)..(351): Ceres Promoter PT0625
gatcatgatcagtttcaactcgctgtgcccacgtgtcgagagatcggcacgtgcctgagctctcagccgctcataaatacacttgtttagtagcaacagtatactatagtagtcctctcctgtttggcttttagcttgcatcgatggatggatggatggatcgcatgagagggcttcgcgaaggtacggaaccttacacaacgcgtgtcctttctacgtggccatcgtgtaggcgtctcgccatgctacgtgtcccggaggatgtctcgatgccaacccttataaatactgttccattccaatcccatcgccacagccagtgcaaatctgatcgatcaagataatcgagca

SEQ ID NO: 7 - DNA, 1022 bp, Arabidopsis thaliana
  misc_feature (1)..(1022): Ceres Promoter PT0633
cccgatcggccttaatctgagtcctaaaaactgttatacttaacagttaacgcatgatttgatggaggagccatagatgcaattcaatcaaactgaaatttctgcaagaatctcaaacacggagatctcaaagtttgaaagaaaatttatttcttcgactcaaaacaaacttacgaaatttaggtagaacttatatacattatattgtaattttttgtaacaaaatgtttttattattattatagaattttactggttaaattaaaaatgaatagaaaaggtgaattaagaggagagaggaggtaaacattttcttctattttttcatattttcaggataaattattgtaaaagtttacaagatttccatttgactagtgtaaatgaggaatattctctagtaagatcattatttcatctacttcttttatcttctaccagtagaggaataaacaatatttagctcctttgtaaatacaaattaattttcgttcttgacatcattcaattttaattttacgtataaaataaaagatcatacctattagaacgattaaggagaaatacaattcgaatgagaaggatgtgccgtttgttataataaacagccacacgacgtaaacgtaaaatgaccacatgatgggccaatagacatggaccgactactaataatagtaagttacattttaggatggaataaatatcataccgacatcagtttgaaagaaaagggaaaaaaagaaaaaataaataaaagatatactaccgacatgagttccaaaaagcaaaaaaaaagatcaagccgacacagacacgcgtagagagcaaaatgactttgacgtcacaccacgaaaacagacgcttcatacgtgtccctttatctctctcagtctctctataaacttagtgagaccctcctctgttttactcacaaatatgcaaactagaaaacaatcatcaggaataaagggtttgattacttctattggaaagaaaaaaatctttggaaaaggcctgcaggg

SEQ ID NO: 8 - DNA, 1000 bp, Arabidopsis thaliana
  misc_feature (1)..(1000): Ceres Promoter PT0650
catacttaattctaaaaaaacaacacttatagtttataagcagctcttatgataaaaatctttctgagttatagctctgttaaacttgtattcaccccaaaaacggatgtttcatttcttattttttacttggagtattttattgtaatttgtaaaaaaaaatgtaaagtgggggatatcatgaaaaacaacgtcactttgtttggtcacaatatacatttgataaaataatggtcgtcgcgtgatttagttgatttttgttttatcaaccacgtgtttcacttgatgagtagtttatatagttaacatgattcggccacttcagatttgggtttgcccacatatgacataccgacatagaaggttaaatccacgtgggaaatgccaatattcaatgtttggttttcaaaagagaatcatttctttatatgatctcaaaagtatggaattgaaatgactaatgagcacatgcaattggtgctatcttaaaaaccgaacgtctttgaatttaatttgtttttcaccaaaggtacctaatgaaaccctttcattaaaaaataaaggtaacaaacaaaattttgtattggaaaaaacattttttggaatatataatttggtaatagaattatgagcaaaaaagaaaaagaaaagaaagaataatgagcataataaagcctttacagtattactaattgggccgagcagttttgggctcttgatcatgtctagtaatcttaaacagacgataaagttaactgcaatttagttggttcaggtgagctaccaaatccaaaaatacgcagattaggttcaccgtaccggaacaaaccggatttatcaaaatccttaagttatacgaaatcacgcttttccttcgatttctccgctcttctccactcttcttctctgttctatcgcagacatttttgtttatatgcatacataataataatacactcttgtcaggatttttgattctctctttggttttctcggaaaa

SEQ ID NO: 9 - DNA, 998 bp, Arabidopsis thaliana
  misc_feature (1)..(998): Ceres Promoter PT0660
caagtcaagttccaatattctaaggagaaataatagtatactaaacatacattagagaggttaaacttctttttggatttaagtgtgtatgcataggctatttattcttaagtataactattaactgtagctagatttatacaagaaatacataaaactttatgcatgtgaggtagccatgaatatacgtacatgttgcaatcgattatacatgttgtatttggatttctctatacatgttttaacttgtcattctctaagtatatacataccattaatactgtgggcatgagtttatgataagacttttcttttggagaccagttttgttttcctttccacctatatttgtctataggcttcacggtacactagtttacaagtgtttttatatgttctaaataaaattgagattttccggaacggtatgatctgtttgcaaataaggacgtatatataacagtatcaaatatatttgttgttataaggcaataatatattttctgagatattgcgtgttacaaaaaagaaatatttgttaagaaaaaaaaagatggtcgaaaaaggggagtaggtgggggcggtcggcttttgattagtaataaaagaaaccacacgagtgacctaccgattcgactcaacgagtctaccgagctaacacagattcaactcgctcgagcttcgttttatgacaagttggtttttttttttttttttaattttttcatcttcttgggtttggttgggtcactcttcaggtcaggtgtgtaaaaaagaaagaaagaaaagagagattgttgtgttgtaacccctttgactaaaatctaatgaacttttttaacacaacaaaactccttcagatctgaaagggttcttcttctctcttagtctcttcgtccttttattctccgtcgtcgtttcatgatctgactctctggtcttctcttcttcttcttcttcttctattttttcttacttcgtcactgttgtgtctgaac

SEQ ID NO: 10 - DNA, 1000 bp, Arabidopsis thaliana
  misc_feature (1)..(1000): Ceres Promoter PT0665
aaaaaggatgggtaatgggacctattttccccaacatcccacatgcacacttccctctccattctctcacatttatttctttcattctaatttatccattccgtgtgtaacatattcactaataatctcatctcactaactcattcattgattgtgatatgtttatctagaattagtgttttaacactgtgtctacatatgatttccttttcattgtatgtgaacatgttaactcactaatcattttgtattttcgagttaacatgagtctccacttcggtagactaaagtaaagataggtttgagtataataaagtttaaaatttgctttaaaatcaatatttataaataagtttttatcataagtgatttttgtatgttatattggaccttgtataaacagactacagaagaaaattatttatgagaacttgtaatgttagagtggacctcgtataaactaattatgtgggcttttaccataaactatttatgaaaattattatggcccacaccactataactaaagcccacatatttagcagcccagtttcattgtaagagacatgttcgctctggaactagaattttctggtttttgggtatttgttttcttatgtgtagagaaatgatggtaacgattaaatgttgtgtattacaatttacaatggtaagacgattaatatatttacacacaattttgttgttgctgtaacacgttagtgtgtgtgatgatagaatttcataaagctttaactacgaggggcaaaatgttaattctaaatagttgacagcagaaaaagatatgtatacataatataaggattaaaacgtaaataataataaataaggcgagttaaattaaaaccctgttaaaaccctagcttgaaacacatgtataaaaacacttgcgagcgcagcttcatcgccatcgccattctctctctcatcaaaagcttttctccttgattttcgcattctttagagtcttaacgcaaag

SEQ ID NO: 11 - DNA, 999 bp, Arabidopsis thaliana
  misc_feature (1)..(999): Ceres Promoter PT0672
cagccgtaaatcctccataaatttattttgcaagttttgctcattatataatgagcggaatttatgatataatcgtttgtaataatgttatgttttgatcaaaatttgaaattaaaagtaggtgagaacttgttatacagtgtagataaggtggatcttgaatataaaaataaaatttataagatgtatttaaagcagaaaagcataaaactttagataaaataatgtaaaaatgtgttagcatcaatgttgggatattggccgacccgaacttaatcaatgtcggaagccattacttctctcccaaaagacctttttccttcggagaactaggaacttcctcactacctttcgcttaacgtgaaagccataaatttcatatattcataaaaatcagaaaatctaaaactgtttagtatcacctgtttttggtatagactattggttttgtgttacttcctaaactatatgatttcgtacttcattggatcttatagagatgaatattcgtaaaaagataagttatctggtgaaacgttacttcagtcatgttgggtctagatttacatactactatgaaacattttaagataataattatcctagccaactatatgttctatattatgggccaagaagatatagaactaaaagttcagaatttaacgatataaattactagtatattctaatacttgaatgattactgttttagttgtttagaataaatagtagcgtgttggttaagataccatctatccacatctatatttgtgtgggttacataaaatgtacataatattatatacatatatatgtatatttttgataaagccatatattactccttgacctctgcccccatttccttttactataaataggaatactcatgatcctctaattcagcaatcaacaccaacgaacacaaccttttccaaagccaataataaaagaacaaaagcttttagtttcatcaaagacgaagctgccttagaa

SEQ ID NO: 12 - DNA, 1000 bp, Arabidopsis thaliana
  misc_feature (1)..(1000): Ceres Promoter PT0676
aagatagtacagtttcagtgttttgagaaaaaaagctgaactaaaactaaaatgtttaaggacacaatatttagtttcaattagataattcaacagtttgaacaattttttttttttttttttgaagtcatttatttatacaatgttttaaaacgcattaagcatttaggcagccgacaaacgcctattgtctaactgtaaataggcgcttccacttaggttcatattgcatatttactatatgtgtatagtgacaaaaaccaatatttctcttattttggatgaaggtatagtagttgttaaatgttcaatataattaagcattaatgacaaataaaataaaattaatttagttgataaaaagataatcttataaaaagatcgatgaatagatataatggtttactgaattctatagctcttaccttgcacgactatgtcccaaggagaggaagtaccttaactataattctgaacataattttgtctatcttggtgagtattatatgacctaaaccctttaataagaaaaagtataatactggcgtaacgtaataaattaacacaatcataagttgttgacaagcaaaaaaacatacataatttgtttaatgagatatattagttatagttcttatgtcaaagtacaattatgcctaccaaaattaattaatgatttcaacaggaagtctgagatgatgggccgacgtgtagttacgtttcttgaattgtgagagatggtatttattatactgaagaaaacattatttactaaataaattttcatttcacatcttctgtaatcaatgcgggtagatgaagaagttgttaatacgatggccaaccatatggatctcttttttggcgtttctatatatagtaacctcgactccaaaggcattacgtgactcaataaaatcaagtcttttgtttccttttatccaaaaaaaaaaaaaagtcttgtgtttctcttaggttggttgagaatcatttcatttca

SEQ ID NO: 13 - DNA, 998 bp, Arabidopsis thaliana
  misc_feature (1)..(998): Ceres Promoter PT0678
aattaaatgaaaccgcccctaaattaggagggatttgggtaagtggtaacacattcactggaaacatgtgaagaaaggaggatgtcaagtagctgaaaactcagtatagtaaccaacggcttctcaccaacctttcattaataatttggtcatccctatatttttattcaacattttgtttttcaatagcttagagcaccttaatacctttcagtgtttttttataaaaaaaacaaaaattgggattaatcatcaatccccaaatgtaacgtttacttagattatgttcatttttctatacacacaaatcatattcttttgttttaatcttcgaaaaacgagaggacattaaatacccctaaaaaaggaggggacattactaccaacgtacattaacatgtttgatagcaaacgatttattttgttcgttttgaaaaggggaaagtaatgtgtaaattatgtaaagattaataaacttttatggtatagtaacattttcgaataataagagagggaaaacactcgccattgtcggcaatttagaaccaatattagaagggtttttttagagaaaaaggacttaaaagtttagagaccttaacaacaacttatttagaaatagacatgcttaagttgacaacagcgagtttattttctatatcgaagaaaaatacgaactttttcttaattagatttcgaatgcatgcactatcgagaatcgaccgtcacaagaaaaaactaatatacatactgtacatatctatattcaatattggtggggatgggtttaatgtgtatttataattcatggataaattcacacaataaggtccatgaaactagaaggtaccaaaaataagcattaatgactctttgccacttatatatatgattctctcatagtaccattttattctcccaaacctatcttcttcttcctctcttgtctctctcgctctctctcttctacattgtttcttgaggtcaatctattaaaa

SEQ ID NO: 14 - DNA, 1000 bp, Arabidopsis thaliana
  misc_feature (1)..(1000): Ceres Promoter PT0683
gattgaatgatgagtgtgcacccttgtattactaataaaaaatttagcaacagttataagctaacgtcatccatgagtcattcattagattcactatttgcgttctcaaaaatcgaattgttaaaatttgagaagctctaatatacgagtcaatgagatgtggcaaaagcatgtccttgaccataaaatttcgaggggtcaactcattagataaggacaagaatcaaccaattgaaggcgtcttctataacaagtttctttattactaatattaaagtccaatggggtgagggggagaagaacttaaataaaaggaaataattggtaagtgaataaaatctaaatacgatactagatgattgatttgtgctagtgcatggtattagatcagatatgtgttactattcgaattcaaattggcatattccatgttgttgataagaaaattgtagaagtgtaaaagctgagttactatattcaaactagtggtttacataaagtgagacaacaactgtttcacaaaaatgactataaaatagtaagtagtattaggtcaattgattttaaaattttaatcaaattcaaatttgtgatataatcaaatttgtttatagaaaatgttaagaaatcaattttggcagaactaattcagtgagaaacaatcatttacaaaaacaattttaacattatttaacagtaagatttgacatttaacccgttcgtgtgaacccatcatatctaacatggctctacccatgacgcctccatgccatggacaattttgacagatcagaagttctgaacgtggacgaggtaagaacaccatgatgatacgattggagttagttatgtcgccaccgacatcactgccaatctcattaataaaagtggtactaaatctctaatctctattaactataaatataacaaagaaccaaaagaaagtttcttatctctcttatctttcataatttccaagaaacacaaaccttttctacta

SEQ ID NO: 15 - DNA, 1000 bp, Arabidopsis thaliana
  misc_feature (1)..(1000): Ceres Promoter PT0688
acgttcagaggcatcgcttttgtacaaattgaagcgggtttgttcaatatttaaaataacacaggaaacattcaaatgtattattgatgttgcttaggtttgtgaaatgatatgaaccatatcgtatatattactagatttttcttatatgttttaagggtagtggggctgacctatcattctgtttggcattaccaatcagactatcagagtattcaccattcaggattccataactagaaaaagaaggggtttacattttctcatactgtataattttctactatcagagattttatcgattacattaatctcatagtgattattctgatttataaaaaagttgacaaaataattaaaaccagtattttataacaagattgtctctctcccatggccattattttgacctctgacttatttaaatcttaattaacagcataatactgtattaagcgtatttaaatgaaacaaaataaaagaaaaaaagaacaaaacgaaagagtggaccacatgcgtgtcaagaaaggccggtcgttaccgttaaggtgtgtcgaactgtgattgggccacgttaacggcgtatccaaaagaaagaaagggcacgtgtatagatctaggaaaaaagaaagaatggacggtttagattgtatctaggtaccaggaaatggaacgtcacaccaaacggtacgtgtcggatcctgcccgttgatgctgacggtcagcaacttccccttattcatgcccccctgcccgttaattacgtgtaacccttccatgcgaaaatcaaacccttttttttttttgcgttcttcttcaacttttctttttaaatcaaaccttttctttttaaaatcacattgcatttcctaacgctcaacaaaatctctctctactaatatctctctctctctctctctattgttgaagaagactcataatcggagattgtttgtttttggtttgctctgtaaattggagaagttttgttagagatcaa

SEQ ID NO: 16 - DNA, 1000 bp, Arabidopsis thaliana
  misc_feature (1)..(1000): Ceres Promoter PT0695
aacattttctttaacttactcttaaattttaatagtaagttgatgcatgttatgttgatccgtcttgatcacaaatattgttttatggacgaattctttgacagtaaatggctatagtgactcagcttggagcatcccgatatgaaaacaaagtgcagtattgtgtcgtggtcatcactaacgcactttcctagaactatcgcgcgtgtttgacctatgcaacacaccagatgtcatgaacgtatacttaaatagaaacaatgatatagacaattggctatattctgtcatggaacgcaaaccggataacatgtctattagattcatcggacttgatcatggttatgtcttaatagacgaattctttgttaacgattggttaaaacggctcacgttagagcatcctactatgacttcaaaattgataaatattacatggaaatcactttaattttagttagaaggtagttaatttagatattcttatttaataaattaaaaaatagaagaaaaaaagatgagaagagtttttgtttataaaataagaaatatcttttattgtaattttaaaattaaacaaatttaatttatattaaaattatctttgttttattgttaaggcaataattatttttttggtgggaattgttaaaacaataattagtatactgttaagtggtcctttaataataagataacgtgatttaaaaaagaacgagacaggctaatatagtagagaggaaaaaatacaatttaggcccaataaagcccaatatagagttgtgctcaaacacaggtcttcgccagatttcctatgacgccgtgtgtcaatcatgacgccaagtgtcattcaagaccgtcacgtggcgttgtttctacacataggcgatccatacaaatcagtaacaaacacgaaaagagcattcatatgtacgaaagtagaaaagaagagactctttgtgataaaactaagtaagaaatagcataaaagtaaaaggga

SEQ ID NO: 17 - DNA, 1000 bp, Arabidopsis thaliana
  misc_feature (1)..(1000): Ceres Promoter PT0708
gtttccaaaactagtattctttatttgctctattcattatatttttatatttgtaacgtcccgaccgtctttattaggtttcgacaatcacttctcggaaggtcgtccatcctgaaattactctatcctaaacatgtttaactataaaattctctcgaaacttttgtaacgtatataaccacataaattctcttaaacttatttgcatacaccattatatttctgaaatcgatatgttacaatattatttaatatttagattacttttactgaatcgaattaaatatcaaatcgaaacaaatctaatctaccaaaaataattttgttataaacatttcttgcctagttctacctcatatacattttagttaaagaaagaaatcacaacaattcccataattcaataattaaatccacaaaatcttggagtaagtaagagaaataaaaagatagtatcttaacataaacaattcaaagatgctctctcacacaattcacacacacttacaaaacaaaagacagaaacaatgttttcattcaaatcaaaagaagttataacactagtacaaaaaaagctcaaattctaatagtaactctttttatttcccaattacccaaagattctctctcacttcacaaaactagctttgagagtcgtgttccacaaaatccattaaagctgaaacggttttgctcaccattcaaacaaatacaaaattgcaaaaccccaaattataacaaaataatataaaaattaaaccgctaaaaagagtgaaccaacaaaaatcgccgaatgtgtgtgtaatgagaaaaccgacccatcatcccaatcatctcttcccgtgtcactctcttcctctcccacgtttcttctctcttccctttatgggttttaacttctccttcttcttcttcttcaatcttcagttttcaaattcaacaacaattcacattttgatttcttcatcatctctctctctctcgcttctctctcaaatcg

SEQ ID NO: 18 - DNA, 1000 bp, Arabidopsis thaliana
  misc_feature (1)..(1000): Ceres Promoter PT0710
tagtgcgcgtggggagagggaatggtgaaaccttagtggttaagttatgaggaaaatgataaaaggataaaacaatcaaatgcagcttgaaacggccataacataaagtaccttatggtggtgcgaatatttttgtgtttctttcactcttttattgctgaaagctacgacacttgtcttaatatattgtttccgcaagtcacatgatctactttttatttaacgtctagaaacgccgagatatatgatgattagtatatcacgtctatgcaaattgttagttcgtgtttggccaaaagatatcgagacatgtctgaagaaccgagtctggttttgagatatttcttcaagcattactatacaatagaaaaaggagacacgcgaatatgataatagcaaaaggcataaaaaggcgaaaattaaagaaaaacgtaaagtgatttggcctcaatcaacgggaacgtatcttaattttagaggttcttcttttacttttgagacgagagagtttgcgtctttgcgagctgctttggttgactaaacattatcatattgaaaaccaaaatacaacggaggaatatttgtcacagtttcactttcacattgtttccttaacgtttaatcaaccttgttcaaaatttctatagttgtaatcatcattgtttacaaaattttcgttcaaagatgattttaaataaaattgtgaaagaaaaccttttctgaaataaggattggatgatagtgttaaaagaaaaatatgaactgaggcaaaaagaggagtggtccccggaagattgtgaaatgtgtcatctaaaccagccagacgtagtcacgtgttctctctagctttatgaacttccttagccagcaccatcattgtgattgtagtatatatgtaaccctaccttcatctctcccattttccattctccatatagactcctttacaatatacaaaacctatccaaaagcgaagaagccaagcaaacatattataaaa

SEQ ID NO: 19 - DNA, 1002 bp, Arabidopsis thaliana
  misc_feature (1)..(1002): Ceres Promoter PT0723
gtcatatcttatcaacacgtcaacgatcaaaacctttagcctattaaattcaacggcttagatcaaaacgaaactaggtgggtcccacttttaatatcgtggctgcataacatttcctcgataactgaagccgttgtggtctttctcagaatctggtgcttaaacactctggtgagttctagtacttctgctatgatcgatctcattaccatttcttaaatttctctccctaaatattccgagttcttgatttttgataacttcaggttttctctttttgataaatctggtctttccatttttttttttttgtggttaatttagtttcctatgttcttcgattgtattatgcatgatctgtgtttggattctgttagattatgttattggtgaatatgtatgtgtttttgcatgtctggttttggtcttaaaaatgttcaaatctgatgatttgattgaagcttttttagtgttggtttgattcttctcaaaactactgttaatttactatcatgttttccaactttgattcatgatgacacttttgttctgctttgttataaaattttggttggtttgattttgtaattatagtgtaattttgttaggaatgaacatgttttaatactctgttttrcgatttgtcacacattcgaattattaatcgataatttaactgaaaattcatggttctagatcttgttgtcatcagattatttgtttcgataattcatcaaatatgtagtccttttgctgatttgcgactgtttcattttttctcaaaattgttttttgttaagtttatctaacagttatcgttgtcaaaagtctctttcattttgcaaaatcttctttttttttttgtttgtaactttgttttttaagctacacatttagtctgtaaaatagcatcgaggaacagttgtcttagtagacttgcatgttcttgtaacttctatttgtttcagtttgttgatgactgctttgattttgtaggtcaaa

SEQ ID NO: 20 - DNA, 1001 bp, Arabidopsis thaliana
  misc_feature (1)..(1001): Ceres Promoter PT0740
tgtggccactaaagatttacccttaaccgggcccatataagcccacgtcaagtggcgcttatacgctctccgtaagagagccaacatttggtatgtaatgttgcaaattattcttcaagacaataaattcaaatataattcaatattgtccaaatatagtgatgtacttcagttgtgcacatagaaactccactaaaccaacttttagatagatgcattcacaaattttcaacaatgtcgcgaaagtctaatccatcaccagattctaacattttaattattatatttaactatacatactctaatcagcatgagtcaaacgtgtacaatagcccaagcatataataagaccaaagtcaaactcaaataaatgtctccaaactcaaaacttgaaaaagacctaattattacatggtagatatgactttgtcgacaagtaaaccaactaatcctcgaagctaccttctcttcccagttattatgtgtgatcgatttataaatctcttcttctaataacacctatatttttcttatgatgtgaataaatataaaacttttaactttaaaacatatttatccgaaatattgcacttagatttcaaatagataaataatagtactatctaactgatattgaaaagacctaacacggaaaacagttttataaaaaatcccaaatgtgggtaattatcttgatttcttgggggaaacagaaaatggattaagattaatcggagtcgtgtcaagcagctcgttaataactgtagcaagttgactgagtaagcatcaacgtgtcatctccgtaaagcccattatttctagtctcgccgcgtcttctcttccacgtagcacttcactttttctctccttttgtttcctttggaacacaaacgtttctatttataggaataattacgtcgtccgtatctgtgtcggaacatagatccaaattaaaagcgacttacttaattacatatcgttcgtgtttttttcttcaaaaa

SEQ ID NO: 21 - DNA, 1024 bp, Arabidopsis thaliana
  misc_feature (1)..(1024): Ceres Promoter PT0743
tcgattggcccgatcggccccaaaatcaagctgagccgcttcaaacttcagcttttgaaatcacccccaaactcatgtcctcttatcattataactaaaggatctttcattttatttaactcatcgtcttgcactacccaacccaaaggttccaactatacccgaagctttctaaaggtccaaagactttttttttcgagccagactattcaagccaagaaaagccaaaccccacaagccagtacttttcaattccatattataaacttatctgtcttgttttagtcccactaaaaacaacagaatttaatttaggttgagctaaaacccttgacaaaagtgtatagtcgtcgattcagtagcacactcatcactcatcagatttgatagttgacctaaagtatgactactccatttcaactaacaaatgaaaataaaagagacctaagggttagaggattgaaactatactctcaagtcttttatcactaggctactaccagctagttaacttgatggatttaagcaagaaaacgtagaatttatattcgagcagattgtttagctaaaaaagcttgggtttgaaattgccttttctcccatataagcacgtcggttcctaaataactctttctagcggagagtgtctttccaataatttaataaaaatggtgtttgtatatcaaaaaaaaaagaaaaaagaaactgatcgagatagaacgtttgcagttttataaacaatttaaaaaacaaaaaaaattaaactcaatgtattttttattaattcacaaacaataataaatcataggatcgaatatttacacggtatcaaaacctactcgccgctactatataaaaattgaagtcaaatatcaaccgcaattattaaaccagcaagacaataattcataaacttaatataaacataaataaattaatgttacacaacgatatatggtgagggttattactatcttcttcctctcaaaacacatctcctaaccttaagctttagacggcctgc

SEQ ID NO: 22 - DNA, 1000 bp, Arabidopsis thaliana
  misc_feature (1)..(1000): Ceres Promoter PT0758
agctagccacatcagtgaccaaaaaagataattaacaaaccaaataaaataacaaattttgatcatttggaataaaatttataaaaggaacgaaagcgccttctcacgggtcccatccattgaaatatattctctctttttgctctatataataataacgcgtactaatttgtagtatatattattacaaagtcgatatttgattgttttgtgaacgttgatatattaattttcttggatgatgacaaaaaaagtcatagaaagtaacgtgtgaacatagcattaacaaaatacaaacataatatataaccaaatatatgaaaataggataaaatctcattgaatagatcttcttctattcaaatatataaatatttgtttgtctataaaattaacagagcattcacattatctaaaataatagtaaaatcaaaataaaactaaataaaaataactctggttttataacgattgattttaaatattagtttttgttgtaaagagatcattatatatgtctgtaatatttttatactgagttacatgatatttagttattatagcgtaattaactaagataagaaattaactaaagtgatattctgattattattatttttgttaggacacgtacgtggaaaaactaaacactataggttacaaaacggtataataaactcaccattactggaaaatgtttgcatttgactcaataagtaacttattataagttactgatataatgcatagttttgaaattcttaaataaattattttggtttcgcatgaaaatatgaaaggagagaaatttattattgtcacttatatatatatacatcgtaatcattttttcgtgaataattctctctcccattccattatttctcagtatctctctttctttcccttactttattgttgcttttaaaccttcaatttgctcataaaccaaatatataatatcaaaacaaacaaacaaaaaatcagaattcccctaata

SEQ ID NO: 23 - DNA, 921 bp, Arabidopsis thaliana
  misc_feature (1)..(921): Ceres Promoter PT0829
aaagttttgaattattgggaatcaatttcgaagttttgtaattctttgggggctaataggatattttattttcttggtttcgtctattgttgtttttctatttatggttgggcttttagaactctggacaggcccatgtcatatgttttcccttctccttatatttttcatttttcattttgttaaattaatgcataatatccaaaaacaatttaaatttttgaaggaaccctttagttacggctccgaagctttcacaagtgagaatgtgagatcaaagaaggcaaatggaggattttaaaagttaaaatcatcttttatctgcaaaagttgacaatttttttgtatcaaatctaaatcatcaaactctcttaaactacaagagcataacaacctctatgtaatccatgaaataatctgcttgaaggacataacataaatcattatggctagagtgactaacttcaatcaaatcctcttaactctagctcccttacaatggtatcgtaaaacattatgcattagggattgttgtcctaggaaaataaaataaaaatccccacagaccaactaccattttaacttaaaaataagcttcgtccgcgacgaattgttttccatcctaaaaatagaatggtgtaatctgctaatggtttagttccattaacttgcaagttctattgaaagcctaaatgtcaataaagatattaaaattcggagtcaaaagacaaatgaatcaaaagcaacaagacaagtcagctccattcttcactacccatcttttacaataaatcatctctcttttcacaaatttcaaactactctcattgccctttagctttgttatagagccaacactacagagagactcacacacttgtttcaataattaaatctgaatttggctcttcttataaacta

SEQ ID NO: 24 - DNA, 763 bp, Arabidopsis thaliana
  misc_feature (1)..(763): Ceres Promoter PT0837
aactacaagggagacataatatcaccatctggttcctgttatcatctgaagatttcttgttttaccttccagtgataaaatgatccttataatacatatagatatattaaattgctgtattttaagattatagatatataaggtacatgagagtgtttatttaaaaaaattcacttggaattcatgttttgtgatacgttagattggaatccatttgggaaaagaagaatcatctgttcttatgtctcaaattttgacttcattcacttttcttcttgtcttttaagaaagcttccacaatctaactgttcgatgtgaaaactgagattcgagtaagaaaatgtgaactgtgttatactgttttttaattagataatttagattgcactcagataaattaataacattcctcgaatacttttatgtgattggatatattaggtatatctgccaaccaaccaataaactgctatgtttaaacaaattaaataaattagtatatgtttactcaagaataaagaagatagaaaagaaaattctatatgagctaaatttgctggaggaggcatcggacgtgggtaccagacctttccaagcacacgagtagtgcttagccatgtcatgctaacatacaccatttggttcatacaaaatccaaatcaaaatctatttttaaaatcttttgcacacgtctttgaaaaacacctctcatactatagctacggaagcttcaatttcaaggtttgtctaaaagctaacgatt

SEQ ID NO: 25 - DNA, 751 bp, Arabidopsis thaliana
  misc_feature (1)..(751): Ceres Promoter PT0838
atactggtatgcttaaggttgaagccaagatctctgtcttacccaagtaaccactttctattagaagggatcaacactaagaatatggagatttaagcctaagggctaaggcggttctcaacaatacatgatgtgaatacaatcacagacgatttactgaggtttgttgataagatcttgatcagtctctgcatcatctgttcaacaatctcaatctttgactgtttgctttcggagccataaacagaggaatcccttattccctgttataggagcaatacaccaagtattatttccatggctgaaattctcttatggaaacctaattgttccattgaagctgtaaaatcgaatctggtgaatattctcgagcaaagccgcatgctaattatgtcaattcagaagagtttgattaggagactcgaagcgagtttgatgatctttcttgatgttcaactccgattgtaagggtataattgacttttcatgtattacggctccaccacctgacactaaggcactctttgtccatctcgttggtatcatcggattcggatggtaaaaataaaaagagcagaggaaacttgttactcatgcaagcttctcaggtgccacgtcactccattacgtgtcatcttcacacaccatctcgctcaaaaccgatctcatttttcaaaccttaaaggcagaagcaactgattaagttaacactcttgagaagctctcgattaagcttgaacttggaggatca

SEQ ID NO: 26 - DNA, 669 bp, Arabidopsis thaliana
  misc_feature (1)..(669): Ceres Promoter PT0848
tctctttaaatcagttaactaaccgtttatatatttacgataaggtttgaagagattattgataaaataatacatttcataatcccgcgttcaaccgtttaaagtaacatttaagttgactatatctaattttttttccattaaatatggagctggtaaactttatcaacttctaaaaagtgtaacaacaaaaattaggtcaatcacaattctgttttttttattattttggattgacttccaattgcaaatagtcttagtgatcaccattatcatacatatatacatcaagtaggtttcatcatgatataccacaaagtatttgacaagccatatggttttggatcaaaaagtcggtccaaaattaatgttttatgtgcaagaaccgacccattgtacacacgtgttaacatcttcaagactttcatctctatttttcttttggtcattaagatacccattgatccgaatctgttacattcccacctacttttttaatttttactatccactccaaattaaacacaaccgatgattttaataattggaagcttttaaaaatatttcaaaacaagcctctttgtgtttgtctatatatatacacgtaataagaaggtgaatgaatctcacagcttacttgttctaaggcttccaataacgaaaacagta

SEQ ID NO: 27 - DNA, 702 bp, Arabidopsis thaliana
  misc_feature (1)..(702): Ceres Promoter PT0863
cgggaaacgacaatctgatctctagtccagtcgattggcccgatcggccgattataaacttacatgagacaagtataaataattattataaacttattaagtttaagatcaaggcttttgtgcaatgtatcaatgaatgttagatgtgatatgatgaaagcaatgttttaaacacatacatagtcattgatcggaatgtgtgttattagaaatgcatgcctaagccgatagggttatctatgtttggtcttggacattatagccaaatttcgaatctaattcttccaatatatatttttttttttttgcttagggccactactagtattgcttatcaattttaagagctcatgaaaatgcaacaatatagtagttgcaaatccttgtttcaagagaaatcaaagggccacttgtgaattgaataataataatatttgcaaataacctttcactaaaccataccaacaaaaccacacagatttggcaaagacataacctttgggagacgtgaaaaggctcaaaatttgacaattgtccttacaaattcgctcattagtgcaattgtgagatttgtttgcatccaaatccaattcataactcacactcgtctcaaattcgaaaaggcctgcagggccagtgcactgggatccaacaatgtcctccgactcgtccaagatcaagaggaagcggaaccgcaccgcg

SEQ ID NO: 28 - DNA, 435 bp, Arabidopsis thaliana
  misc_feature (1)..(435): Ceres Promoter PT0879
ttctaggaagactggtcaagctaagctgtttctgttttttgtttttgtactttactttttgtttgctagtgggaactgggtttattgggccttgaagttgataaaagatgaataaaagacatatcgcctaaagcccatatgagaagcagaagacaaaaacctccaactttgggcataaattttgattatagttaaaagtccagacccaatttggcacctggcttagttacgattctaaggcatgacacctgcctaatatgtttattacagaaaataaagagaatcagctaggtgtcccttattgaacacattaacaaactccaacgacactacgtgtcttcgtgactcttactatatccaaaaacctatagctaaagctgaattttccatgattagtatagtcccaaccaaaaaaatactgaagaaggcataagc

SEQ ID NO: 29 - DNA, 397 bp, Arabidopsis thaliana
  misc_feature (1)..(397): Ceres Promoter PT0886
agtgtatttgaaaacgacattgaagaattaatatatttttttttaattttagttttttatagtacaaatattaaaacaaacaatcctaccatatcataacatttgtaaataacattttaagttttgttttgagttttaattaattttctatgacaaaaaaatgaagtcaatagactaagtgaatcatatagtataaataaacacaatttaaatagtttcaaataaatttagaaagaataaaacaaatagaaatcagaaggtgtctgtttcctcctcgcaacatacgatcaaagagaaacaacttgaccctttacattgctcaagagctcatctcttccctctacaaaaatggccgcacgtctccaaccttctcccaactccttcttccgccatcatc

SEQ ID NO: 30 - DNA, 1024 bp, Arabidopsis thaliana
  misc_feature (1)..(1024): Ceres Promoter YP0007
agcagaacaactatatttattgtgtcacataaatctgagatcatttataaccaccaaagaacctatacacagtaaatgacaaatgtatctccctctatctctattgcccatatgtagatgctaaagtaagatttctcttttttttaatgtacttttttttgtataaagtatattccataagaaaaaggaaaagcttgtttatggatcaattgaccccaaaaaaagtttttagatcaaagcccaatataaaaaaaaaacacagtagtgacacaaaggaacttaaataaaccatgaattgatctataaacagtagagatcgataaggcgaacattttccatgtgaagtgtcttctttcatctataatatttttgacatccaataatttcctctataatatcattcacataattgatagaaacattatgttagaattgtccacatcatttgagctgtaatatattctgttttaacaaattatatggtagttgcttaatcttatgtccatcttcttctatgcatcgttttcgcgcctagttgtccagtccatttcaactacctacctctaattcttatcttaaaacaacattttttaatttaagtattatgctcaaagactaactagatagaaaaccgttattaaacattaaacgaattaaaagtcttacatggaaaatgtaggtttataaaccacgagttatgattgacaataaaaaaaatgcaaatcatcaatcaaaagagacttgagtgcgactctatatcaaccattgcaattaaaattatctatcacaaaaattttagacagattaagttaatttagtctaaattcactaatttattttctataattagtaattaactatatttatttatttacacattttctgataatttagaaatttgcatgaataacaaatataagattttggaaattagtagcaaatttaattaataattatttttgcctaaatgaaccaaactataaaacctccacatacaccagtcatcaaatttacagagacaaca

SEQ ID NO: 31 - DNA, 1000 bp, Arabidopsis thaliana
  misc_feature (1)..(1000): Ceres Promoter YP0008
ctcgagagatgaagtcttagtaatgtttgaacaaacaataatcacgttttccatcaaattcgagcatttaaagtttatattactacatgccccaagatgataccgtccatctcatccgaaaatatttctgaaattgcgctaagacaacaatgtttgctcaaattcgatcatttaaagtttacaaatctctcatcaatcttacaaacttctcacactaaacagaggtacatattttcttataaagacaaaaggttcgaacagctggcttctcaactcgagttgtttgtcagggcctctcttcactaactacaagttggtacttcaaatattggtggctagcttcacgtgatattgtctacaaattaaacccatgaaaaagctgcattaattgttccaagtgaaccctgaggagtgtcaatagtctttgctttagtgtgatcattaaaccaaatctctaaattcctaatttgtactaacatttggaacgtatttcctactcttctccctgctccaactcccaaaaataagattagttagatttctataactaatatacatgtatactcccaaaaacagtaaaaccatattaataaagctaattttgcatagatttatttcggtaaaccggcggttcaagttggggaaaaaaaagacaaacggtctaaagtcatccaaagacaaaaaaccaaagacaagttgagagagacgagaccaatcacaacattgcttcgtagattgcgtgacatcatccttgacggctactttcatttgtgtcttatttggataaaacgcacgtgtttaattcacgaaccttcatagcaataagaaatttccattactttcatattttcaactttttttattacccattacatgcttaaaatattaattcacaagtctttgtcaaaattcaatattttccaggttcatgaaccctttttatctcaatctactctataatatctccctataaattacaacaaaacctctttatttttca

SEQ ID NO: 32 - DNA, 999 bp, Arabidopsis thaliana
  misc_feature (1)..(999): Ceres Promoter YP0019
gatataagtagaatcattttttgccgccgtttctcgctaacacaccgaaaactgaatcaaatctcctagctcttctacgcaaaatcgagtgcatcgacaatggcggaacgtggtgtcgaacgtggtggagatcgcggcgatttcggacgtggattcggtggtcgcggcggtggaagaggtggtccgagaggtcgtggtcgccgtgcaggtcgtgctccagaggaggagaaatgggtgccagtgactaagcttggtcgtctcgtaaaggaaggtaagatcacaaagattgagcagatctacctccattctctcccagtcaaggagtaccagatcatagatttactcgtcggtccttcattgaaagacgaagtgatgaaaatcatgccggttcaaaaacaaaccagagccggtcagagaacgagattcaaggccttcatcgtcgtcggagatagtaacggtcacgtcggattaggagtcaaatgctccaaggaagttgcgacggcgatcagaggcgcgatcattctcgcgaaattgtctgtggttccgatacgaagaggttattggggtaacaagattggaaaaccacatacggttccgtgtaaggtaaccgggaaatgtggatctgttactgtacgtatggttccagctccgagaggttctggtattgtggcggctagagttcctaagaaggttcttcaattcgctggaattgatgatgtctttacttcttctagaggatccaccaaaactcttggaaacttcgtcaaggtatgtactttcacaatggctgttttggtttgatgaactctgaattaggcagtgaaaaagtaatcattaccagttaagtgaatttatattgaagattaggatttagctgattgtattggtttgagcatgtgagtttgtgtttaagattgcttgaattgaaatgctttaggttgtttgattacgctaaattctgactaatgtaattcaaattgttgttgtttttttttggtc

SEQ ID NO: 33 - DNA, 1024 bp, Arabidopsis thaliana
  misc_feature (1)..(1024): Ceres Promoter YP0028
gtcagtgaagtcgattggtagtacttgaaacacttggttggtttcatgtatttggcctatatataaacaaacatcgtaattatatacggatttttttcggaattttacgccatatctgtaagtatatataacatgcatgtcgttttcaaattcatatgatgaacgatccacgtaagtgctactactcctacaatattgcatgagagagatatgtatttataaattttattttgaagaagaaataagagggaaggttacttgggtggatcgatgtgaaaacaaaagaagaaaaagcgaaacccactaagccattacatgatatcgaccttcttatctttttcctctttattttatttttctcatcttctttttgtcaggacttttttctacttaatgaaacctccaaactatctaactaatacactcccatgtagaataaagaaaattatataagatattgttgatattttgtaactagaaaatatatttgctctgtaatttttcgtaagttaaatcaacattttaaagtagaaacaaatattactgcaaaaagtaggatcattatttttgtccaaaatctcagttagctatagggttgtagtaaaaacaaaacacattcttgatttgccccaaaaaataaagagagagaagaatattgttcaaaagtggtctcttctctctctaattatgttttcactaaacccaattagattcaaacagtctacaaagtccaaaagataaacatgggacaacaattcgatgcaaaaaatcctcttttcatgctctttttttattctctagtcttttaaattactaataaaaactcacaaatccaccaaacccattctctacaactcaccttcatctagatttacccactcccaccgagaaacacaagaaaaaaaatatacatatataaatatacaagacaacacatgatgctgatgcaatatacacaacaaagtattaaatcttagatattgtgggtctccctttcttctattcattttcttattcattaaaa

SEQ ID NO: 34 - DNA, 1024 bp, Arabidopsis thaliana
  misc_feature (1)..(1024): Ceres Promoter YP0039
ccgttcgagtatttgaaaatttcgggtacacccgcctaaataggcggaccttatctagtatatatatacatttgaactatattgtttactttttagttgatttaggctatgtcatgacattgacataaatctacctgttatttatcacgtgtaattcgtgtaaagtgtaaactagaaagttcaaatacgtatttgtttttgttctgttatataggattgtcatagttgtaaatctacaatttattacaacatgaataagtacacaagcaatgtaattggatttaattgctaaactctttacatggtcaatctaaatttgataagaaatacgtcacatattactaagactgatagtttttttgttgtcaccaattatttttgttaaattgacgaaaacaattccaaaaactcaaatgtacaaaatcatacagtctcacaaacatctcatagagaaagatataaatctcccatatgggaacgataacacgaggtcgaaatactattcgtaaaactaaaacgccttagttataaatcgttagttgtaaccgcggtcgagaatacatacagatccacgaaactactactacacatgctgctgaattggaatttggaaaagaccatcttctttaggaagagctcacccaatgagtgacaaaggtgtcggtggcttgttttctacccatatgtatacatcaaatggtagtttcattaacgtttggttttgagaaaagtaagactttggctagtagctaggttcgtatataataaactcttttgagaaagttcatcactggtggaaaatgttaaaccggttttttctcattttttccgccatgttaaccaccggtttaaaaagaccgtaacacattgaaagattaataagggtatatttgtaattacggtttgctggcaatttttaattattattttaattagagaaaatagagaagccctatcaatgtacatggtatatatataaaaggcaaaaccctagaaaacgatactattcgactcagccgtcctt

SEQ ID NO: 35 - DNA, 1024 bp, Arabidopsis thaliana
  misc_feature (1)..(1024): Ceres Promoter YP0050
aatctgatctctagtccagtcgattggtacttgagggaaacatcatatttttaaaccttgtctcagtaagctaacacacaccccttgtgattacttatccatgtttatccacaagaatgcagttggattgagatattttcttctttgttgaaatcaggcctcaaggtgttcatgtggtctgcaaaaaaattcccaaaaataaagatagtgacatctgaaatcgataatggattagacgaagagtttcgtgttattccttggtatgggcgggtttggggacagatattttggcacagacgaggactaggccactgtggtcctgcagcattaggtgtcccttccatgtcctgcattacattttattgatggattcatcaccctatctactacaacggctacacaaactatgaagagttttgtttactaataaatgcccaagtgaggggtcgatcgaacccgggacacgtttttcagtttaccatatagaattatccttggaacccttgatactccatagaacatcaccacctctgttgtcatctcaggaatccaggttcaaacctagtctctctctccctagtgggaggtatatggccactgggccaatgatgacaaaatgcaaaaaaaataaaatacatttgggttcattatctaaaatatctcttgtgtttgtaagttttggttgcacactcgtgtggttgaagtgtgtgtgagaggtactatacaatacactctgcttttgttttgtacctatctctttctcttctccacatatccaagactttggggataaagctgagatcattggttgccatttggttgtgtagaagcaatcacccatttgctttatccgaggttgataaatttcctcgggttctccttctgacacgtatgacaaattctaatagtatattcctcgtagatattacctatatattctcaatagttgcaggtacttaaggctttgtcttggcatcctcgtcctcttcagcaaaactcgtctctcttgcactccaaaaagcaa

SEQ ID NO: 36 - DNA, 999 bp, Arabidopsis thaliana
  misc_feature (1)..(999): Ceres Promoter YP0086
cttatcctttaacaatgaacaggtttttagaggtagcttgatgattcctgcacatgtgatcttggcttcaggcttaattttccaggtaaagcattatgagatactcttatatctcttacatacttttgagataatgcacaagaacttcataactatatgctttagtttctgcatttgacactgccaaattcattaatctctaatatctttgttgttgatctttggtagacatgggtactagaaaaagcaaactacaccaaggtaaaatacttttgtacaaacataaactcgttatcacggaacatcaatggagtgtatatctaacggagtgtagaaacatttgattattgcaggaagctatctcaggatattatcggtttatatggaatctcttctacgcagagtatctgttattccccttcctctagctttcaatttcatggtgaggatatgcagttttctttgtatatcattcttcttcttctttgtagcttggagtcaaaatcggttccttcatgtacatacatcaaggatatgtccttctgaatttttatatcttgcaataaaaatgcttgtaccaattgaaacaccagctttttgagttctatgatcactgacttggttctaaccaaaaaaaaaaaaatgtttaatttacatatctaaaagtaggtttagggaaacctaaacagtaaaatatttgtatattattcgaatttcactcatcataaaaacttaaattgcaccataaaattttgttttactattaatgatgtaatttgtgtaacttaagataaaaataatattccgtaagttaaccggctaaaaccacgtataaaccagggaacctgttaaaccggttctttactggataaagaaatgaaagcccatgtagacagctccattagagcccaaaccctaaatttctcatctatataaaaggagtgacattagggtttttgttcgtcctcttaaagcttctcgttttctctgccgtctctc

SEQ ID NO: 37 - DNA, 1024 bp, Arabidopsis thaliana
  misc_feature (1)..(1024): Ceres Promoter YP0088
tcgattgggattactacttcatctagtaaggttctgaaaacgtttgttgttgataaggaagattcgtctcaggttattactgttgatcttcaaggtttgtgattgtgacgcttatacatgtgctgaaactgtggtgtttatttattgaaaacaaaaaaaaagtctctcttgtagtttcattgtactaaatagaaaacaagaaacgtttttttctttaatcttctacattgataatattggatcaaaggattgtttctgcaagacacaacacaaacatacttatactagtttacttctactaagtactaactacatacccatacacacacttgcacctagactttacttctagacatcattaccctaaggtagaaccaagcttacaagcaagttttaccgacaactcttacattacaactctagtctgtagtctttaacgtagacttactaactagtcattagtggtttaattttttaaattttcatccatatgtttttgttgtagatataaactaaagtcggtcacatttaataattgtcattatgtccgcgtaaaagtcaattcagctattggacatttatgaaatgtaagattttctctctcatttccccgtgcgtgaagacatgcattggtttttctgtaataatcaacaaatccaaaccccttttcgatctttatttggacattgttagagacaaaatttctctatagtctttttcctaatttgataccatgtttttgtttctgcacaaatttactcactggtttaactaactatccacttatttatgattttaccattaggcgtcagctagccctagtcaaatttgtaaacaagccaagctatctacataaatcgagatgtcattaacgttaatcgtcgttaattcgaatttgaaaacatagatagctttagcagtacaatgggcaatggtaagaagaatagcaaaaggcccaatatttggtttgcagaaattaaagccttaaaaaaaagcccacagatatttgtcaaagaaccctaat

SEQ ID NO: 38 - DNA, 1024 bp, Arabidopsis thaliana
  misc_feature (1)..(1024): Ceres Promoter YP0092
aaagattgagttgagagagatggtggagacgcagaacagacaaagggagtttaccatatagtgctctaaagggcaatgagattgcagtgatgtggctatccggggaatcatcgcaggttattccttcccatgagcaacaatcaatggatgggttccaattcagaggagaaacagaagaagaaacgtttccagagaaccacagtagggattctcgatcttgcgagttgcagagagcctctgaaactgcaatagaaaggacactgatgaaaagaacacactgaaggagtatgccaatcatgtgaaaactcagagcttgtattggtcttgtggttgatgaagttctcacaaaacctttggctttgaatctcccctcattagtcatggtgagaacaagaacaagacgagaaacagacaaagaagatgaaaaaacttgttggccagtgttgactaagggggaatagccccagacataacaaaattagacttgtcgtacatctttaatatttttttatctgtttctttgtcctgacgctttcattattcctgtgatcaattttctcataccattggtccatcgttaatcctttcttaatttcattttctacgtaacatgagaggagaccaagtcctatgagaacagttgacgtaacagtggttgttaagttaagttaaaaagaggaagctagtgagagtgaccgttaggtagagaagtgagatctttaaccactcttctttctctctctctctgcttttttcgtcgtctttcacatctactgttcgcaaactctcttatgcttccaataatggtgataccaattgagacttgcaggagaatctcctcttctccacactctatcaactggtcagccatggaatggtcgtttcagtttcaatattcctggattctttttaaggattcctgtttctcttctgttcctggtatattcttaacgacgaaattagtatcggatcctggtaatacattttgaagcttttaagtaccattgcactgggatccaacaat

SEQ ID NO: 39 - DNA, 1020 bp, Arabidopsis thaliana
  misc_feature (1)..(1020): Ceres Promoter YP0096
gaggtcagtgagtcgattggtgcaaaattgaaaaattgaagggtgaaacaaatttaaagataatatctattaaatcctctaattttaaaaatttagcaaaaattgtattttcttatggatctgttagttcacacgtatcttaattagtaccaaatcatatctaatgattagtgataaaactagttagatatctatatgtgtctttaccatttaacttgaatccttcttcttttttttacgtaaacaacttgaatccttcgttaatacataaatttaaagcattttttctttaattctattgatcggtatatatttactataagttttagctcatatgcaatttcaaatgatatgcttttaaattttgtctaggtgtgatagttgtatctttaacataaatcttatagcaaaattatacttgatattctaaatttatctatttgctcttgtgaacctcatattagtctagagaaactttgaaatcctttcaattagttgtatgtccaatacatttttactaacatttattagtctttttaattaagattattgttagaaaaaaaaagattttttaaaaataaataatatgttttagatacaatgtgagttaggcttcttatattttaaaaaataaatttatttcatacttaaaaatagtttggaatttcaatttatttggctgaataccataaaatatgtcaatttgaaccttatacccattgactatttggtgttagaaaccctttaacaaaaaaaaactatttggtgttagatatcaaaataaaaaaagtttaaccattggtttcttatattgaattggatattgttacatgtattaaagtttttttggtttaattttgaaacgttgatagaaactattaagtttaagtttggtagtatatttatttgtggaaaatttaattgccattaaatataacgtcaactttttttggttttttttgagaagttacgttgtgattttgatttcctatataaaagttagattacgtcattttttaa

SEQ ID NO: 40 - DNA, 1000 bp, Arabidopsis thaliana
  misc_feature (1)..(1000): Ceres Promoter YP0097
ttcatctttatatttaagagtttaaaaactgcaacttttgtttttctttcactaagtcttatggccacagttaattaaaagcagatgaaaggtggtccaatggaaaaggagaatgtgattgggctagttgggagagttctgatgtctagtgttgggtacacgtgtccgtcagttacacatagcattaaatcagacggcatgtcattattcaaatctagttcacatagtacgactaatagctgataaattaatgattatacagcatatgaattatgaattcaaaaaaaaaaaaaaattgaaaatgttaaggagatgctatattttacaaaattcatcgcaatgctttctactaatttgctaagtggtcttctccagttagtcttgtcgattccaagcgatattattaaatcttgaagcatcgctcaaagcattatagcttaagataaccaaattgttattaaaaacacctagtgaaatttttaaattaaaacaattttgatatctttgtaatatctaatactactctttctgtgtctaaaaggattaattttcaaaaatttcacacatattaaaaaaaaaaaaaaattactagctaaacaattttcaataatcataaaacaatagtaacttaataatttttttttattttcaaaatagtccttcaagtttacaattcattttagtattataatcaacaaaatttgtattaaaaagttggaaaattaatctttgtggaacaaaaaaatctagaaatcattttttagaattagagagaggtttgataaaaaaaaataaaaaaaaatagagagaggtagtacatactaaacgatgtgatactactattgacaaaatcttaattctcagtttagtagaataaactagaaggaatgaatgaagtaaatgcgaatccaactactaacaaaccctacttagtcatcatattttcccatatgaaatccctatataaacccatcatcatctcccacttttttcatatcca

SEQ ID NO: 41 - DNA, 1004 bp, Arabidopsis thaliana
  misc_feature (1)..(1004): Ceres Promoter YP0101
ttctcgttctctagaatattgctggaccggattaggtcaatattattgggccagattagatattgaattgtcgacgttgcttacgttacgttatatcttgtttaagaattaaacctatcgacttagtcttaattaagaaaacattgccttaaattctctggtctgcgaccgtttttttgaccgttaacccctaattaaagaaacaaaataattatagaaagagcactgaaatgtgattattttaacagtactcttatgagaaaattcgtactttttagttttttttttgtacaaatctctaagaaaaacactactactaattaagaaacgtttcaaacaattttattttcgttggctcataatctttctttctcggtccgggactaaccgttggcaaaaaaaaaaaaaaagttgacaataattattaaagcgtaaatcatacctctcaaataaaaacttgaatttggaaacaaagacaactaaaaaactcgaatttaagagaattcctaaaatcaagtgaagtatcatcacttggtaaaatttcataaccgttggcttctatttctatgtgtgccttggtttgcaggagataatatttcatttccaaccaatgatattcgtacacatagtcaaacaaatgtttgtctttgttattatattgagaaagaaacaagaaagagagagagagatagataagacgaaggaagtgaagcttccaagcgcccaccgttaaaaatctcgtgtgcaagtttcaaatacaagtggccggtggtctccataatttgatcgtcatccaattaaaaaggaagaaaaagcgtgttttatacaagaaaactcattaaaatagcaagtctagaaatatctcaacactaatctaccacgtctattacacacacacacacacacacttgatcttaatttattttcaagattcaagaaaatacccattccattaccacaacttgaccacacgcctatatataaaacataaaagccctttcccc

SEQ ID NO: 42 - DNA, 1000 bp, Arabidopsis thaliana
  misc_feature (1)..(1000): Ceres Promoter YP0102
atttggttgataacgttttcactcgactaattatatacttcagaaggatagtaatagaataccaaaataattaaatgattggttagtgccttagtggagactttttaaccgattctaatagactaatgatgtagctaagcatttatttgggatcatcactgtttgaaaacgtgaaatgtgataaaagttatgaaacgattaaaatataaaataaccgtacaaaacattatgtaccgtttttttctctgttcttttggcgatttggtttagttcgttacactctaaatgttattgcagatatatatataatgatgcatttgcatctgaggaacatataattccggttaacacttccaaatcttatatccgtctaggtagggattttataaatcatttgtgtcatcatgcgttatgcttgtcggctttgaccataacgcagagatatagaactagcttttacttaacttttagatttattatttgatctagagttaagtggagatatatagtgtttttgttagattattggtggatgtgagagtttgtctttagtttcaagttgagaatataaggcaagaggagactctgaggcaatcagaggttttgattggcaaaatatccaaaaggcccaaaccaagtcgaagcccatctcgtacaaaaaaagaaagagatctgtaagaaaaaatattctttgatattcttacaaaaataagtgtaaaacttttattagtcaaaatcttcaatctttaaaaactctcatcactcctacgaaagcgcgtgagagttatgagacattccttaatagcattactcacaagtcacaagttcaaaacgtctgactgaaacagaaacaagcctttgttgaagtcttgaagaagagacattagtactcgtcgtatagccataaaaggtaatatacgaaatttcttcgctaatctcttcaccttcctctacgcgtttcactttcactttataaatccaaatctcccttcgaaaacat

SEQ ID NO: 43 - DNA, 1004 bp, Arabidopsis thaliana
  misc_feature (1)..(1004): Ceres Promoter YP0103
gttttgaagaacaatctggatcgaaatctaacataaggtcatcgtattcaagttacgcagtcaaggacttgacatcatcctactctggtctgaggttaccacttccaaagatgggatttttcgactcggtatgcttcctaagaaattcgttttattgaacctagcaaatatcttgtaatgtaagattcctgagatgatgaagaaaaaacaaacttttgttacagcaggagaacggagagaaagaaaacagagaaccaaatgctcttgaagcaaacagaagaagaagacacaaatccaaacttgagacttcttctacaccagaaaaccgcagcattctgggacaacgcaaaacacgaaagtgaaacgggcaatgatatatatgtcttgggtgcgttacaaggcatcgtttgcaactgttgagttggataagtcaactgtcttcttttcctttggttgtagtagctgccttttttttcctttgttgctttaagaaatagcccgaaaaaaagaatgttctacatttcggagcagaaaactaaccgaatgagtttttggtcggatcatcggatcgatcagatatattttgagttacgaactgttataaaaaaagccataattttgtgttgagtttgcaaaataccttataacttgttatttgagattgcacctccatatatattaattcgtaagagtatttattaagtaagctttagtataaatccttttttcctttaaagtaagttaatgttctactaaataatagtaaagttgaagaaccgctccgtttttacaccatgcacgtgttatctaacaaagaaaatatggtacacctaatggctaatgcaaaggacaacacaatgaaactaacttgactctgtgttatagaaacccatagacatctgcatacatcctagtatttgtataaattggactcaaattcctgaggacaatcatagcaaacaatcacatcatcgcaatatacataaacaaaagaggaagaaaaa

SEQ ID NO: 44 - DNA, 1003 bp, Arabidopsis thaliana
  misc_feature (1)..(1003): Ceres Promoter YP0107
taacaatccttgggaacattgcatccatagatatccggttaagatcgatctttgaactcataaaaactagtagattggttggttggtttccatgtaccagaaggcttaccctattagttgaaagttgaaactttgttccctactcaattcctagttgtgtaaatgtatgtatatgtaatgtgtataaaacgtagtacttaaatgactaggagtggttcttgagaccgatgagagatgggagcagaactaaagatgatgacataattaagaacgaatttgaaaggctcttaggtttgaatcctattcgagaatgtttttgtcaaagatagtggcgattttgaaccaaagaaaacatttaaaaaatcagtatccggttacgttcatgcaaatagaaagtggtctaggatctgattgtaattttagacttaaagagtctcttaagattcaatcctggctgtgtacaaaactacaaataatctattttagactatttgggccttaactaaacttccactccattatttactgaggttagagaatagacttgcgaataaacacattccccgagaaatactcatgatcccataattagtcggagggtatgccaatcagatctaagaacacacattccctcaaattttaatgcacatgtaatcatagtttagcacaattcaaaaataatgtagtattaaagacagaaatttgtagacttttttttggcgttaaaagaagactaagtttatacgtacattttattttaagtggaaaaccgaaattttccatcgaaatatatgaatttagtatatatatttctgcaatgtactattttgctattttggcaactttcagtggactactactttattacaatgtgtatggatgcatgagtttgagtatacacatgtctaaatgcatgctttgtaaaacgtaacggaccacaaaagaggatccatacaaatacatctcatagcttcctccattattttccgacacaaacagagca

SEQ ID NO: 45 - DNA, 1024 bp, Arabidopsis thaliana
  misc_feature (1)..(1024): Ceres Promoter YP0110
gggatgcggttccgcttcctcttgatcttggacgagtcggaggacattgttggatcccagtgcaatggtaatataaaacaagaaaacaagagattttataggacaatcactaaatgacatttaattgattaaacatttattcattaataattgtatgttactaacttcaacatttaataattttgtttaagatacgtttacatcagagactattaatatttttacaggttgtaactttaaactttgtcttgaatcgaacatgactatagattttgggcaaacttaaagataacaacatttccgttttttttcaaattattacaaatcaaactgatatattagacacaacacgattacacgtaatgaaaaaagaaaaagataaaaagataaaagaagggatcgattctgtttggtctggtttagtgagattcaaagttaagctcttcctttcaagacatgccttcttaaaccgggaatgtgaacgtttgtaatgtagtccgtccagttaatgcttccaacatcaaatccaaattctctcttctcgtcctctgacatattctccattaatctctggggtattgctgttatcaaatctgtaaaagaaaccaaaaaaaaaagatgaaaactttgcgggtaccggttttgtctgctctaagaattagaatgttaatgagttctgtcttaccttccaccatagaaagtgtatggctcataaatagtagcaaggtgtttggcttgttcaacagatttcttgcatataaactttagcttctgcatcatcttactatccactgaactcataccactcatcaacccactccgttcttgagcatctctccacaaatgatccgagaaatcatcaacggaattgaaaagtttcatcaaacgcaccataataggatcacctttagagtccatgcatggagatgttttgtagtggttataaagaagctccgctaagtcttcgaaaaccagcgggtttatcgccgaagaagcgatctgatacacgtttatttcaggttcc

SEQ ID NO: 46 - DNA, 1024 bp, Arabidopsis thaliana
  misc_feature (1)..(1024): Ceres Promoter YP0111
cgattggatttagtctatacattatagggcgcaagtttgtggatttaagaattatataaaaacttgaaatatatagtttttatgcattctcctcttgtgtaatacataaaccaaatatgagataggttaatctgtatttcagataatattaaattccaaacaatatttttacttgttataagaaggcaattaatatctctctgttaatggcaagtggtaccaagtagtattaaactattaatgcaatggaagagtactgttggaaattataatcctctatcacacattcaaacagatctcctgaaatcttctcttccaaacttgtacttctctgatccaaatgtaggctccaaaatatagacatttaccatttactaagtccacaactcctttcttgtctccttcaaaaatgactcttgtgtaaccaccatatgactccgacagttcggcattgccatgatgagagcttaaaaattcaccttcctgagcatttcaagtcttcactcccttagcttgacctgaaccaagataaaatgcctttgtcgtcccgtaatatccatcctgctttggacggcatcatagttacattcgatccatcctatttacaatgttattttagtattaaaaacatgacaataaatttgttgttaaacatattcaaatacaatatgattggatttataagtaattgtaatatgaaatgtccttagtaatatgttaaaaaatacatagatacacacacgtactaaaagaggcaacgcgggagatgtcattagaggaagaactaggaagcagagcgttcatgcaaaatgctaccaaaaacgttaatgcaatatctcaactaatcagcacagtccatttcatactgagaatgtaaaaaccaatcagcatcgtccattttttcatctaattatttgttaactcttaattggccacaacttccaaccacatgacgctctttctattccctttatatattcccatctcaaatgttcttggagacacaaaatatcataaacatata

SEQ ID NO: 47 - DNA, 996 bp, Arabidopsis thaliana
  misc_feature (1)..(996): Ceres Promoter YP0115
gtcgattggatgatgaacattctacatatataattattatgtttaagcacttagacagcataaattctttctaattatataaatctaaccttgttacattgtacatctataaattacttgaagaaataacgagttctatttctttttaaaaattaaaaatactataccatatctcagtgattaagttgaaccaaaaggtacggaggagaaacaagcatttgattcttccttattttattttattcatctctcactaatgatggtggagaaaaaaagaaaatacctaacaaacaaatatatattgtcatacaaaaatatttctatatttttagttaattagtttatattcctcacttttcagggcttatataagaaagtgagcaaacacaaatcaaaatgcagcagcaaatactatcatcacccatctccttagttctattttataattcctcttctttttgttcatagctttgtaattatagtcttatttctctttaaggctcaataagaggaggtactattactacacttctctctacttttacttgtattttagcattaaaatcctaaaatccgttttaaattcaaaaataaacttagagatgtttaatctcgattcggtttttcggctttaggagaataattatatgaaattagtatggatatctttactagtttccattcaaatgattctgatttcaatctaatactctcactctttaattaaactatatgtagtgtaatttcacactgttaaatttctaccatgtcatgtatattagagttgcatagaaaattgtaaaacatccatttgaattcgaatgaaacaaaatgttttaaaataaaattttggtttttaaaagaaaaatctaaaactgaattatatcgtttaaccaagttgtaaaagtcataaaacgtagtatcttgtaaatcgctcttccacggtccaaatagacttctagtaataaacaagtaaaactaattttggtttcttac

SEQ ID NO: 48 - DNA, 1024 bp, Arabidopsis thaliana
  misc_feature (1)..(1024): Ceres Promoter YP0117
gtcagtgagtcgattggatcacagtcctttatgataaaacaaactcataattattccaccgacaacatgcgttttaaattattttttcttaaattatattatattatattgatatcaacctagctaaaataattcggatggcgaaatcggacaatttttaatagaaaaaatgggtatgaagatagtctatgattccgttcttagcgactagagggacctgctcaaatctcccgggtgatacgcgatgtcaagctcaatagaaccccacaaccgacgagaccgagaaatccttgatttgggctagaagattttgaaataaatttaatatattctaagtaacttgcttaaattttttttcaaactctaaagacataactaacataaagtaaaaaaaaaaaagttaatacatgggaagaaaaaaattaaactaatgattagctctctaacgtgtttaatctcgtatcaagtttttttttaaaaattatattgctattaaaacattgtactattgtttctattttgtttagctattattcttgtgaaatgaaaagttgtgtttattcaattactaaatggcaatatttatcttggaaaactatacctctaattggattaggccctagacatcctctttagcttattgacgttaaaattattcccaaaactattaaagtttagtagtttgaaagatgcatcaagacctactcagataggtaaaagtagaaaactacagttagtgtgattatattttaaaatatataaaacaatcttattaaactaaatattcaagatatatactcaaatggaagataaaaacatttagtctgttaccactaccagcctagctagtcactaatagtcactttggaactgagtagatatttgcatcttgagttaccatggactcaaaagtccaaaaagagaccccgagtgaaaatgctaccaacttaataacaaagaagcatttacagcggtcaaaaagtatctataaatgtttacacaacagtagtcataagcaccattg

SEQ ID NO: 49 - DNA, 1000 bp, Arabidopsis thaliana
  misc_feature (1)..(1000): Ceres Promoter YP0119
taccaaaaataaggagtttccaaaagatggttctgatgagaaacagagcccatccctctccttttccccttcccatgaaagaaatcggatggtcctccttcaatgtcctccacctactcttctcttctttctttttttctttcttattattaaccatttaattaatttccccttcaatttcagtttctagttctgtaaaaagaaaatacacatctcacttatagatatccatatctatttatatgcatgtatagagaataaaaaagtgtgagtttctaggtatgttgagtatgtgctgtttggacaattgttagatgatctgtccatttttttcttttttcttctgtgtataaatatatttgagcacaaagaaaaactaataaccttctgttttcagcaagtagggtcttataaccttcaaagaaatattccttcaattgaaaacccataaaccaaaatagatattacaaaaggaaagagagatattttcaagaacaacataattagaaaagcagaagcagcagttaagtggtactgagataaatgatatagtttctcttcaagaacagtttctcattacccaccttctcctttttgctgatctatcgtaatcttgagaactcaggtaaggttgtgaatattatgcaccattcattaaccctaaaaataagagatttaaaataaatgtttcttctttctctgattcttgtgtaaccaattcatgggtttgatatgtttcttggttattgcttatcaacaaagagatttgatcattataaagtagattaataactcttaaacacacaaagtttctttattttttagttacatccctaattctagaccagaacatggatttgatctatttcttggttatgtattcttgatcaggaaaagggatttgatcatcaagattagccttctctctctctctctagatatctttcttgaatttagaaatctttatttaattatttggtgatgtcatatataggatcaa

SEQ ID NO: 50 - DNA, 999 bp, Arabidopsis thaliana
  misc_feature (1)..(999): Ceres Promoter YP0120
tagtttttgatttaatctacgtttttcttaatcataaatgggtaattattagtttttgcaaaatcaaaatccaaaaattgttctaaacactgcaaccatttaaggcctatatcactcagaaaatttctggtgggagaactaatcgtttgtcctttctaaatctcacatattagaatttagaattagtgtgctacataagaatattagttcagctcggaacaactattttttggtaaaacagagaacttaaacaaatgcattattttatcaacatgcattttgaattgaatataaaatttcataattgtaaagacataaattacataaaattttacatgaaaaaatagatatagaaagaaaatgaaactaactgatgatatgctctctaaattttttaatctcataacaagaattcaaattaattagttcatatttttggttaatataacatttacctgtctaagttggaactttcatttttttctgttttgtttagtcagtattcttaatgtgaaacggaaagttgaatttattcaaacttaaattcaatagcattaattaaaggcgaaagctattatctctacatgtggttcaaactagacatccaatttaattagcttattgacgttgaaatgttttccaaaactactatagtttggcaatttgaaagatgcatcagaactactcagacaggtaaaagtagaacctctagctgtgtgaattgtatgttagtccataaagaacatcttgtaaacttcatacttaagatatatattacaatatatacttgaatggtagataaaaacgattagtctgattgctagcatactcacaactatttggaaatgagtaagatattggcattctagagttactactatggagacaaaagtcgaataaaagagacctcacgtgaaaatgttacgagctagtaaaaaaagcatttacactaacggtaaaaaaagtatctataaatgtttacacaaggtagtagtcatt

SEQ ID NO: 51 - DNA, 999 bp, Arabidopsis thaliana
  misc_feature (1)..(999): Ceres Promoter YP0121
ttggattttttttttgttgagtcagcagaccatctaatctctctttttccaccacagcctgctttctatgaagcatttgggcttacggttgtggaatcaatgacttgtgcactcccaacgtttgctacctgtcatggtggacccgcagagattatcgaaaacggagtttctgggttccacattgacccatatcatccagaccaggttgcagctaccttggtcagcttctttgagacctgtaacaccaatccaaatcattgggttaaaatctctgaaggagggctcaagcgaatctatgaaaggttggcccattctccttgacaggcttaacaatacaacttgtatcgcttcaacaagatgatggcttaataaggatttttgcatgtataggtacacatggaagaagtactcagagagactgcttaccctggctggagtctatgcattctggaaacatgtgtctaagctcgaaaggagagaaacacgacgttacctagagatgttttactcattgaaatttcgtgatttggttagtgtaacccactgttattcttttgatgtctacatctactttacttacattattcttttcttcggtttgcaggccaattcaatcccgctggcaacagatgagaactgatcatgacagggtaggattttatttcctgcactttctttagatcttttgtttgtgttatcttgaataaaaattgttgggttttgtttccttcagtggtttgattttggacttatttgtgttaatgttgttttggctgttctcttaatatcaataacaaataaatttactggttggtatctaagatctaacaatagttactatttttagaggtaaagacaccaaccttgttatattggtcagagagctaaaaccttgacttgttgggaaaacaaaactctaatgacagaaaatctgacatgatgccttataattcacagcctcatgttctacataaatcctaacaatagcactttgtttct

SEQ ID NO: 52 - DNA, 1004 bp, Arabidopsis thaliana
  misc_feature (1)..(1004): Ceres Promoter YP0128
gataaactgataatggaaaagaacaaagaaaccagtttttaactatttgcatatgtaatttatttgttgcaaattatatttagttaaaatgtttcctctatttatatatatatatatcagtcaagcactatgtataagaaatgtcaatttataaatttttacatgtcctttaacagaaagaaaatgaatttttacatgtcattcatagagagtcactcgtttatttcttatatagagaataacacactcacatgcatatgcatgcaatatgatacattttatgacaaagataatcaacggaaacggtcaagacataatttgataaacaacttgcacgatgcacagatctgatcaaatatataactctttaacatatccaaaatattcaaaaagaaaaactcgatccaaactagcaacatcacgctcacgcggtaggctaaaaatttattaatctccaaaagtctttcttatgaacactgcaaacacaacaacttgaaaagtcatataggtttagatgatgacgcgtattggctatcgcttaccggagtggctcataaatacaataaacaatacgtaaaagtcaaagtcaaatatatttagtcaactataaccattaatcgggcaaaacctttagctgtcaaaacaacgtgaaaacgatatttgtatatatcatcaagaatcagtagataagagaatgatttaatcccctgactattacaattttggtgtaataaacagtctctattggtttttattctttgttttaatttctcatgacctatagagagaattaggtagtttcgaaaattggctaatcaacttttgaaaactactgtctactttgcttaaattctctacacttagtttcggataagataattgtcggactaatagttaatcccttgacaatctttgatattataaaaggtttagttaatctcttctctatataaatattcatacaccagctttcaaaaatatataatccaaacaccaaaaacaaa

SEQ ID NO: 53 - DNA, 1001 bp, Arabidopsis thaliana
  misc_feature (1)..(1001): Ceres Promoter YP0137
gtggcacatgctgaaaccccgagcatctctccggaagacacgcgtcgttcgctccaaagaaaacagtcacagctgccggagaatctccgccgtcttcttctgccaccggaaaaactctctccaccactttcagtgcccacctcgtgttatatccactgtatcctcgtagcaccatatcagcctaataaaattttatgtatcaaattttaagacatagccgaaactacactatactagacaataataatatgatttgtttcctgaaaaattatggtttcatgagaaacattaatcatctataaaacaaattagctatggcatcgaagagttatcaatcaaaactgatgaatctttacttaatatatacaacatatctttaccttgcggcggagaagatcggcgagagaagcaccccagccaccgtcactaaaggattcttcagtgatggaatcaccaaagagaaaaaccttccgtctcatcatcttccacacaatcttcttgagaaaatctgagagataagaaaggtgtagtggttttgctgaagtgatcgtgtttgatttagtaaagaaatgctttatttattgttgggggaaacataaataaataaagtaaaagtggatgcactaaatgctttcacccactaatcaccgacctttcatggtttattgtgaaatacactcatagatagacatacaataccttatgtacgtaaataacattttatttgtcgacacttatgtaagtaacgcatagattattttctatgtgattgccactctcagactctcagtttcaaccaataataacaataactacaacaacattaatcataaacatatgctctggtttacaattaaagcttagattaagaaactgtaacaacgttacagaaaaaaaatgttatttacgttttgtaagattagtctctagaatcatcaccgttttttatatattaatgattctttcttatatataaaacctttctcgaaatacccatgaaa

SEQ ID NO: 54 - DNA, 1001 bp, Arabidopsis thaliana
  misc_feature (1)..(1001): Ceres Promoter YP0143
atacaacagatggcagatatcgagttaaatacgtgaatcagccgttacgatattttaaaactagaaaattatttaaaaatattgcaaaataccatttaatttcattgttcataaaaaaaagaaattcaaaaacttaaaaactgattcaaaaatttggattaattctcattaacagtcttcaacactacaacaacatgtttctaatttattttatattttaataattaaacaatatatacgtctgcacattgttgctccgacataatctagtataaaaatagttgcagcatatgtgaaaagcaagcagcatttatcactcaatacttttaattttatctgttgtatgtattaaggttttgtagctttaagaaaacgcttataatataaaataacttctaaaagatatttcatgcgtatacaataaatatttgtgaaaaaacatttcgaaaacgtgtacaatatataaactattgtgttatcttttgacattcaaacaaatgttgacaatgtaattttatccatgatatgattggccaattagctgcgaggtaaaaatccgtatacgagtaaaagtaagataaaatttcgcaagaagatttttagcaggaaatctaagacaagtgtcatgaacgtgtcaatcaacaaacgaaaaggagaattatagaatccagattcgacgtaccacattaataaatatcaaaacattttatgttattttatttttgctctggcagttacactctttttcattgctccaataaaaaaatcactcgcatgcatgcatatatatacaccatagtaaactccgcctcttcttcattttaaaagtatcagtttacactgacacaatccttaactattttcctttgttcttcttcatctttattacacatttttttcaaggtaacaaataatctttttaagtcacttttatactctttaaatcttagattgatatatgaatgcatgttaatatttcaagatttataggtctaccaaac

SEQ ID NO: 55 - DNA, 1003 bp, Arabidopsis thaliana
  misc_feature (1)..(1003): Ceres Promoter YP0144
aaacgttgcaagattattgattgtgagaaagagtgctcaaggtagtactgatttctgtaaagctcacggtggtgggaaacgatgttcttggggagatgggaaatgtgagaaaatttgctagaggaaagaagcggtttatgcgctgcgcataacactattatgtctcgggagaacaaagatggaagcaagagcggtttgattggaccgggactctttagtggccttgtttttggctctacttctgatcattctcagtctggagctagcgctgtctctgattgtactgattctgttgaacgaatacagtttgagaataggcagaagaacaagaagatgatgataccgatgcaggttctagtaccttcatcaatgaaatctccaagtaattcacatgaaggagaaacaaacatctatgacttcatggttccggaggagagagttcacggcggtgggctagtaatgtctttacttggtggctccattgatcgaaactgaaagccatttatggtaaaagtgtcacattctcagcaaaaacctgtgtaaagctgtaaaatgtgtgggaatctccgaatctgtttgtagccggttacgttatgctggatcaaaaactcaagatttgttggatattgttatgctggatcggtggtgaaaccacttcccggttgctaaataaataaacgtttttgttttataatctttttcactaaacggcagtatgggcctttagtgggcttcctttaagcgaccaatacaatcgtcgcaccggaatctactaccatttataggtttattcatgtaaaacctcggaaaatttgagagccacaacggtcaagagacaaaaacaacttgaagataaagggataaggaaggcttcctacatgatggacaacatttctttccacacaaattctcataataaaaatcttataatacaaatacttacgtcataatcattcaatctagtccccatgttttaaggtcctgtttcttgtctgatacaaat

SEQ ID NO: 56 - DNA, 1004 bp, Arabidopsis thaliana
  misc_feature (1)..(1004): Ceres Promoter YP0156
ttggtttgcattgtgaagatttgtattaactatagaacattgaattgatggtgttaagttcttacacaagcgtgcttctcggtttgaactgtttcttttgtatgttgaatcagagcttagtttataggaaccagagtatctacttagtcattctctgatgctaagtgctaaggttctacctagttgccctctaggcccttatgttattgataacttatgaagctatttgaacacttgattcttaggagacctaagttggtacagccagatagagtgtatgttcttgttctctatgtgacaggatcaagctgccacacatagttcaagggtatgctctgtgtgggtttgctcagattgaggacaaatctatacaaggaagtagagtctttgacattttgatgttgtatgataagaagaagaaaggagagtaataaagaaagagaaaagggaaacagaaacacgtgggagaacatcccaaagaggaagcacacgcggatcttcatgcaaagctccccgattctcccatgtggtccctttctccctttgtccccctcctctttcttcttttctcattttactcctttttttaccattatacaacgaatcttttttatcataattttttggttttggtttattttccaataacactttcttggttacttcccattctcactttttcatataagaaactcactttgggaaacttatgtttgagaatgacaagtctttttagagaaagtgatgtaacaaatctaaagtgattatataataaccttgcacaatgtttttgattttttgtaagattcgaatattaggtttattattcgtagggaataaacttactttcaaaagcgttcataagttaatactttcatatatgatcataagtacggacactattgttttttgtttgtttgtgtttattctaaaagaaagtagcttttaattgaaatgtcctcggaggcacagtttaaagttcgagtgtaacagtttctaaggca

SEQ ID NO: 57 - DNA, 1000 bp, Arabidopsis thaliana
  misc_feature (1)..(1000): Ceres Promoter YP0158
ttattagattaatagattgcattgcattgcttgtgctttcaatttacaaattgtctcccaactccatcgacacatctctttttgtgtatataagattcagacttgttatattttttttataaatatgttattagcatcttaagttaaattgattttttatatctgcattaaggattacacgactatatttgcgattgtgtgttggttaaaatataatttaggattgtctttaactacatttaggattatatgactatatttggttaaatataaaatctagctgtgattattagtattcaaaaataagtagcctaaccaattaaaacaacggctattggggcaaattagaacattttagtgtgtccaaaatataatggtcattaggtcatattcctcctagcttcatcgcagcataattgaatgattgccttatttagaagagcttttccactttcccaaaatctaggtgggatctttttgttttgaccttcatttttcttgtttaccatttttagctaaattatttacgattacaaaagatatcaaaagttggatcataatacaatttatagacttactgtagaaaattcgtatgtacaagtacaacaaattcttcataataaattttgaaaattctattacaaatgttgtaagaaatagaatttgaaatatatataaactaaggagaaaaaaaaagagaacatgcattgctctagtcagagtggaccaacatcaacgagataagataacataaaaaccaactcaccataactaaaaacatcccaagagatccaacgattcatatcaaacacaaaaacatcgaacgatcagatttaaaccatctctggtatctccaaaacacaaacacttttttttttcttttgtctgaatggaacaaaagcatgcgacatctctgtgtctttatcttctctctcctcttcttgaaaaactgaacctttaattctttcttcacatctcctttagctttctgaagctgcta

SEQ ID NO: 58 - DNA, 1005 bp, Arabidopsis thaliana
  misc_feature (1)..(1005): Ceres Promoter YP0188
gattggtatgaaatttcggagaccaacaaaaaaaactttattgagcttggagtgaagctatatatatggggcaagatcataatatgtttatatcggccttttcgttaactgaaaataatagttttgagaaatatatcaaatggtaaacagacatcatctttgaaaaataccatcaatgaagttaatattgttattggcatatggtttacccatcttaattttaatgcaaccaaacaaacaagaaacaaaaactgtataagatacaaggtgttttacgattttccgtcttaaaaccgaaatatttttgttcctacgactttaaacggactttgcttaagttgtgtgcatgtaagctcgtcgtccctcgattgtcatcaacattcaccaatatcagcctctatcacacgagtgaaggtggtgattcggcttaatgaaaacagagaaatatttcaatatgattcctattaaattttaaatcttttttctcaatctctagattttcattaaaagcatcatgatttttttccactatgttcatatatctctatcacagttttaggtacattgtagaaattggataagatacgtcatacgtctaacatgaatttggtctagcaaggaaggtttgagataataagtgaaaagaaaacacaagataataaattataatttataaatgctttatagtattgaaaaataagatgattttttttttttttaataccggattggctgatccacttatgatgactcaaatgttattaagtttcaagacaatttatgatgacacaaatcacaatgagtcaatagtagccacgaagccagaaaaaaaaaatgtactacaaaaagataatgatagtacaaaatgatacgtcgtactgccacatgtacgacacaactcgattaccaaaaagcagagccatccaaccataaaactcaaaacacacagattccactggcgtgtgctctcctcacttcactcgtccttgaaacttgaggtactga

SEQ ID NO: 59 - DNA, 1002 bp, Arabidopsis thaliana
  misc_feature (1)..(1002): Ceres Promoter YP0190
taaatagtgacattggtaagaagaaaaaaaacactattaaatagtgaaaaaatggtttataactctcttaattaacattacttattattgctagcacctaaaatctcccacaaaatatttgttgtaaaacacaaatttacaaaatgattttgtttttaaattagtaacacatgttcatatatacgttaataagaacataccctatatgattttatataaaaaaatttctttgagacgtcttattcttttttctttaataatatgcaattgtgagagtttggatttgaatggtagcattagaagcaaacttgaaccaaacatatttcatgaagtcaaacttgaaccaatgtgatcactaatcacagtgttcgcagtgtaaggcatcagaaaatagaagaagggacatagctatgaatcatataatcttgacacatgttttataggttttaggtgtgtatgctaacaaaaaatgagacagctttcttctaatagacttaatatttgggctaaatgtaccacagttgtgaatttcttacaaaaatgggccgagctacaaaaaactacaggcccactctcaactcttatcaaacgacagcgttttacttttttaaaagcacacactttttgtttggtgtcggtgacggtgagtttcgtccgctcttcctttaaattgaagcaacggttttgatccgatcaaatccaacggtgctgattacacaaagcccgagacgaaaacgttgactattaagttaggttttaatctcagccgttaatctacaaatcaacggttccctgtaaaacgaatcttccttccttcttcacttccgcgtcttctctctcaatcacctcaaaaaaatcgatttcatcaaaatattcacccgcccgaatttgactctccgatcatcgtctccgaatctagatcgacgagatcaaaaccctagaaatctaaatcggaatgagaaattgattttgatacgaattagggatctgtgtgttgaggac

SEQ ID NO: 60 - DNA, 995 bp, Arabidopsis thaliana
  misc_feature (1)..(995): Ceres Promoter YP0212
agtcgattggtacactcttaatttaattagagtaagagatcaacaaaaatatagaattttctttatatcgaagtgctacgaccttatatatatagaaaaaaaagcataggtgaatctctaaattgagattgtgctgtagtaaacatattaagtttttagtttttttaagaaatgaatctttttgttgattaattcaaactagtagtcattaagattccggagattccaatttagaaaagtcaaagattcaaagaacaagtccaggtccacatgttgaatccgattcatcatccactcatccttcatatcttcctccaccgtctccgcccaaaaaatcaataacaataaaaaatcctaaaaaaacatatttgattttgaaaaaactttatcatatattatattaattaaatagttatccgatgactcatcctatggtcagggccttgctgtctctgacgtccttaattatcattatttttaaatttgtctctctcagaaaattacgccacaatcttcctctttcccttttccgaaaacagctaatatttgtggacctaaactaaataacgtagcctctagattttatataattactaatactatatgctactacttgttattatttactccaatcatatatgataccaatcaagaatcactacataagtagaaaactttgcaatgagtccattaattaaaattaagaataaacttaaaattttatggtattttaagattccctttggattgtaatgacaagaaatcagcaaattagtcgtaactcgtaagaataaacaagatcaatttttactttctttacaaagattccgttgtaattttagaaatttttttttgtcactgtttttttatagattaatttatctgcatcaatccgattaagaagtgtacacatgggcatctatatatatctaacaggtaaaacgtgtatgtacatgcataaggttttacgtgcttctataaatatatgtggcagt

SEQ ID NO: 61 - DNA, 1024 bp, Arabidopsis thaliana
  misc_feature (1)..(1024): Ceres Promoter YP0214
ccagtcgattggcgcctcgcatgcctatcatatttaaccgtcaataatggatttggcggttttggtaggccgggtcaaccggattaaaagaaaacggtttggagtccttccttgcaattgaattttcacacattcgggttttgtgatttctctgtcataatgggcccggcacatatggttcataacccatgtgggcctatggtataatttttccaattaaaactattgttaggtcgataaaacaaaaaacaataaaaacgagtggaatacacataccaaaaagaatgtgatgaacattagtaattttattttgatggttaatgaaaaacaaaataaatgcatcttggcatcttccgttggaaagcgcaaatagggcagattttcagacagatatcactatgatggggggtgagagaaagaaaacgaggcgtacctaatgtaacactacttaattagtcgttagttataggactttttttttgtttgggcctagttataggatcataaggtaaaaatgaagaatgaatattagattagtaggagctaatgatggagttaagtatgcacgtgtaagaactgggaagtgaaacctcctgtatggtgaagaaactatacaacaaagccctttgttggtgtatacgtattaatttttattcttttatcacaagcgatacgtatcttaagacataataaatatatatcttactcataataaatatcttaagatatatatacagtatacacctgtatatatataataaataggcatatagtagaaattaatatgagttgttgttgttgcaaatatataaatcaatcaaaagatttaaaacccaccattcaatcttggtaagtaacgaaaaaaaagggaagcaagaagaaccacagaaaagggggctaacaactagacacgtagatcttcatctgcccgtccatctaacctaccacactctcatcttctttttcccgtgtcagtttgttatataagctctcactctccggtatatttccccattgcactgga

SEQ ID NO: 62 - DNA, 911 bp, Arabidopsis thaliana
  misc_feature (1)..(911): Ceres Promoter YP0263
atctagctgtggattccaccaaaattctggcagggccatgatctaaaaactgagactgcgcgtgttgttttgcagtgatttgtatttcatatttgcaccatcctacacagtccacttggtatcgtaaccaaacataaggagaacctaattacattattgttttaatttcgtcaaactggtttttaccttttagttacatagttgattcttcatttgttttagtagttatggagcacaataatgtgcaacaaagaaagatcatagtggattaatatgttgagaggtcagaaattcttggttaacaaaaaaaagttacaaggactgagattttgggtgggagaaagccatagcttttaaaacatgattgaacttaaaagtgatgttatggtttgaggggaaaaaggttgatgtcaactaagatagttgaagtaatgtcttaaactaaagtaaaccaccggtccaaccgtggtccggaagcatctctggtatgatttatcctaaaaatcaaaatagtagaaacatactttaaatatatacattgatcggacgaaaattgtaaactagtatagtttcaaaaactagttgaacaggttatgtaccttaaacatttatttcaaacttaaacactaaagaacatatatgaatagaagtttatataaattactatatatctaccataaatctcttataattatgatgtcacgatgaggaagtgttgaaacgttaaaatgccaaaatataagcatgcgacggaattttggcagaagattgtagagttgtaatctgtcgcaatcattactcgtgctagcatttttcattttcccttcatttgtggataacgcacgatataacattctacacaccaacaagattctataaaaacgcaaaggttgtctccatagaatatcgtc

SEQ ID NO: 63 - DNA, 999 bp, Arabidopsis thaliana
  misc_feature (1)..(999): Ceres Promoter YP0275
aaacattaatatgtagtaactatgggcgtatgctttactttttaaaatgggcctatgctataattgaatgacaaggattaaacaactaataaaattgtagatgggttaagatgacttatttttttacttaccaatttataaatgggcttcgatgtactgaaatatatcgcgcctattaacgaggccattcaacgaatgttttaagggccctatttcgacattttaaagaacacctaggtcatcattccagaaatggatattataggatttagataatttcccacgtttggtttatttatctattttttgacgttgaccaacataatcgtgcccaaccgtttcacgcaacgaatttatatacgaaatatatatatttttcaaattaagataccacaatcaaaacagctgttgattaacaaagagattttttttttttggttttgagttacaataacgttagaggataaggtttcttgcaacgattaggaaatcgtataaaataaaatatgttataattaagtgttttattttataatgagtattaatataaataaaacctgcaaaaggatagggatattgaataataaagagaaacgaaagagcaattttacttctttataattgaaattatgtgaatgttatgtttacaatgaatgattcatcgttctatatattgaagtaaagaatgagtttattgtgcttgcataatgacgttaacttcacatatacacttattacataacatttatcacatgtgcgtctttttttttttttactttgtaaaatttcctcacttttaagacttttataacaattactagtaaaataaagttgcttggggctacaccctttctccctccaacaactctatttatagataacattatatcaaaatcaaaacatagtccctttcttctataaaggttttttcacaaccaaatttccattataaatcaaaaaataaaaacttaattagtttttacagaagaaaagaaaaca

SEQ ID NO: 64 - DNA, 981 bp, Arabidopsis thaliana
  misc_feature (1)..(981): Ceres Promoter YP0285
gggattatatatgatagacgattgtatttgcgggacattgagatgtttccgaaaatagtcatcaaatatcaaaccagaatttgatgtgaaaacactaattaaaacatataattgacaactagactatatcatttgttaagttgagcgttgaaagaaaatgaaagagtgtagactgtagtacgtatgagtttcccaaaagatggtgcttgaatattattgggaagagactttggttggttcggttgaatgaagatttttacctgccatgttgatagagaaaggcaaataaatgtaggggtcgatgtctaacgtaaagactggatcaaccaagagtcctcctcctcgtcttcaccaaaaaaaaagagtcctcctcgtggaaacttatttcttctccagccaagatctcatctcatctcttcactctatgaaatataaaggaatcttatggtttttctaaaaactatagtacgtctatataccaaaggaaacaatataaaatcagttaatctgataaattttgagtaaataataaagttaactttgtacttacctatatcaaactaattcacaaaataaagtaataataacaaagaatttttagtagatccacaatatacacacacactatgagaaatcataatagagaattttaatgattttgtctaactcatagcaacaagtcgctttggccgagtggttaaggcgtgtgcctgctaagtacatgggctctgcccgcgagagttcgaatctctcaggcgacgtttcttttgttttcggccataaaggaaaaagcccaattaacacgtctcgcttataagcccataaagcaaacaatgggctgtctctgtctcactcacacacgcgttttcctactttttgactatttttataaccggcgggtctgacttaattagggttttctttaataatcagacactctctcactcgtttcgtcaacattgaacacagacaaaaccgcgt

SEQ ID NO: 65 - DNA, 996 bp, Arabidopsis thaliana
  misc_feature (1)..(996): Ceres Promoter YP0286
gaaaacaatcataggttacgctattatcatcgaaaggtatgtgatgcatattcccattgaaccagatttccatatattttatttgtaaagtgataatgaatcacaagatgattcaatattaaaaatgggtaactcactttgacgtgtagtacgtggaagaatagttagctatcacgcatacatatatctatgaataagtgtgtatgacataagaaactaaaatatttacctaaagtccagttactcatactgatttcatgcatatatgtattatttatttatttttaataaagaagcgattggtgttttcatagaaatcatgatagattgataggtatttcagttccacaaatctagatctgtgtgctatacatgcatgtattaattttttccccttaaatcatttcagttgataatattgctctttgttccaactttagaaaaggtatgaaccaacctgacgattaacaagtaaacattaattaatctttatatgagataaaaccgaggatatatatgattgtgttgctgtctattgatgatgtgtcgatattatgcttgttgtaccaatgctcgagccgagcgtgatcgatgccttgacaaactatatatgtttcccgaattaattaagttttgtatcttaattagaataacatttttatacaatgtaatttctcaagcagacaagatatgtatcctatattaattactatatatgaattgccgggcacctaccaggatgtttcaaatacgagagcccattagtttccacgtaaatcacaatgacgcgacaaaatctagaatcgtgtcaaaactctatcaatacaataatatatatttcaagggcaatttcgacttctcctcaactcaatgattcaacgccatgaatctctatataaaggctacaacaccacaaaggatcatcagtcatcacaaccacattaactcttcaccactatctctcaatctctcgtttcatttcttgacgcgtgaaaa

SEQ ID NO: 66 - DNA, 1000 bp, Arabidopsis thaliana
  misc_feature (1)..(1000): Ceres Promoter YP0337
taatttttttatttttggaactaacacttattagtttaggtttccatcacctatttaattcgtaattcttatacatgcatataatagagatacatatatacaaatttatgatcatttttgcacaacatgtgatctcattcattagtatgcattatgcgaaaacctcgacgcgcaaaagacacgtaatagctaataatgttactcatttataatgattgaagcaagacgaaaacaacaacatatatatcaaattgtaaactagatatttcttaaaagtgaaaaaaaacaaagaaatataaaggacaattttgagtcagtctcttaatattaaaacatatatacataaataagcacaaacgtggttacctgtcttcatgcaatgtggactttagtttatctaatcaaaatcaaaataaaaggtgtaatagttctcgtcatttttcaaattttaaaaatcagaaccaagtgatttttgtttgagtattgatccattgtttaaacaatttaacacagtatatacgtctcttgagatgttgacatgatgataaaatacgagatcgtctcttggttttcgaattttgaactttaatagttttcttttttagggaaactttaatagttgtttatcataagattagtcacctaatggttacgttgcagtaccgaaccaattttttacccttttttctaaatgtggtcgtggcataatttccaaaagagatccaaaacccggtttgctcaactgataagccggtcggttctggtttgaaaaacaagaaataatctgaaagtgtgaaacagcaacgtgtctcggtgtttcatgagccacctgccacctcattcacgtcggtcattttgtcgtttcacggttcacgctctagacacgtgctctgtccccaccatgactttcgctgccgactcgcttcgctttgcaaactcaaacatgtgtgtatatgtaagtttcatcctaataagcatctcttaccacattaattaaaaa

SEQ ID NO: 67 - DNA, 1000 bp, Arabidopsis thaliana
  misc_feature (1)..(1000): Ceres Promoter YP0356
ttagttcattgaaacgtcaactttttacttgcaaccactttgtaggaccattaactgcaaaataagaattctctaagcttcacaaggggttcgtttggtgctataaaaacattgttttaagaactggtttactggttctataaatctataaatccaaatatgaagtatggcaataataataacatgttagcacaaaaaatactcattaaattcctacccaaaaaaaatctttatatgaaactaaaacttatatacacaataatagtgatacaaagtaggtcttgatattcaactattcgggattttctggtttcgagtaattcgtataaaaggtttaagatctattatgttcactgaaatcttaactttgttttgtttccagttttaactagtagaaattgaaatttttaaaaattgttacttacaataaaatttgaatcaatatccttaatcaaaggatcttaagactagcacaattaaaacatataacgtagaatatctgaaataactcgaaaatatctgaactaagttagtagttttaaaatataatcccggtttggaccgggcagtatgtacttcaatacttgtgggttttgacgattttggatcggattgggcgggccagccagattgatctattacaaatttcacctgtcaacgctaactccgaacttaatcaaagattttgagctaaggaaaactaatcagtgatcacccaaagaaaacattcgtgaataattgtttgctttccatggcagcaaaacaaataggacccaaataggaatgtcaaaaaaaagaaagacacgaaacgaagtagtataacgtaacacacaaaaataaactagagatattaaaaacacatgtccacacatggatacaagagcatttaaggagcagaaggcacgtagtggttagaaggtatgtgatataattaatcggcccaaatagattggtaagtagtagccgtctatatcatccatactcatcataacttcaacct

SEQ ID NO: 68 - DNA, 1000 bp, Arabidopsis thaliana
  misc_feature (1)..(1000): Ceres Promoter YP0374
aagacacccgtaaatgttgtcatgtagaagaaactagaaacgttaaacgcatcaaatcaagaaattaaattgaaggtaatttttaacgccgcctttcaaatattcttcctaggagaggctacaagacgcgtatttctttcgaattctccaaaccattaccattttgatatataataccgacatgccgttgataaagtttgtatgcaaatcgttcattgggtatgagcaaatgccatccattggttcttgtaattaaatggtccaaaaatagtttgttcccactactagttactaatttgtatcactctgcaaaataatcatgatataaacgtatgtgctatttctaattaaaactcaaaagtaatcaatgtacaatgcagagatgaccataaaagaacattaaaacactacttccactaaatctatggggtgccttggcaaggcaattgaataaggagaatgcatcaagatgatatagaaaatgctattcagtttataacattaatgttttggcggaaaattttctatatattagacctttctgtaaaaaaaaaaaaatgatgtagaaaatgctattatgtttcaaaaatttcgcactagtataatacggaacattgtagtttacactgctcattaccatgaaaaccaaggcagtatataccaacattaataaactaaatcgcgatttctagcacccccattaattaattttactattatacattctctttgcttctcgaaataataaacttctctatatcattctacataataaataagaaagaaatcgacaagatctaaatttagatctattcagctttttcgcctgagaagccaaaattgtgaatagaagaaagcagtcgtcatcttcccacgtttggacgaaataaaacataacaataataaaataataaatcaaatatataaatccctaatttgtctttattactccacaattttctatgtgtatatatatacccacctctctcttgtgtatttg

SEQ ID NO: 69 - DNA, 998 bp, Arabidopsis thaliana
  misc_feature (1)..(998): Ceres Promoter YP0377
tataaaccattcctataacaccatatttaaacataacaatgaattgcttggatttcaaactttattaaatttggattttaaattttaatttgattgaattatacccccttaattggataaattcaaatatgtcaactttttttttgtaagatttttttatggaaaaaaaaattgattattcactaaaaagatgacaggttacttataatttaatatatgtaaaccctaaaaagaagaaaatagtttctgttttcactttaggtcttattatctaaacttctttaagaaaatcgcaataaattggtttgagttctaactttaaacacattaatatttgtgtgctatttaaaaaataatttacaaaaaaaaaaacaaattgacagaaaatatcaggttttgtaataagatatttcctgataaatatttagggaatataacatatcaaaagattcaaattctgaaaatcaagaatggtagacatgtgaaagttgtcatcaatatggtccacttttctttgctctataacccaaaattgaccctgacagtcaacttgtacacgcggccaaacctttttataatcatgctatttatttccttcatttttattctatttgctatctaactgatttttcattaacatgataccagaaatgaatttagatggattaattcttttccatccacgacatctggaaacacttatctcctaattaaccttactttttttttagtttgtgtgctccttcataaaatctatattgtttaaaacaaaggtcaataaatataaatatggataagtataataaatctttattggatatttctttttttaaaaaagaaataaatcttttttggatattttcgtggcagcatcataatgagagactacgtcgaaaccgctggcaaccacttttgccgcgtttaatttctttctgaggcttatataaatagatcaaaggggaaagtgagatataatacagacaaaacaagagaaaaga

SEQ ID NO: 70 - DNA, 999 bp, Arabidopsis thaliana
  misc_feature (1)..(999): Ceres Promoter YP0380
acaagtaccattcacttttttacttttcaatgtatacaatcatcatgtgataaaaaaaaaaatgtaaccaatcaacacactgagatacggccaaaaaatggtaatacataaatgtttgtaggttttgtaatttaaatactttagttaagttatgattttattatttttgcttatcacttatacgaaatcatcaatctattggtatctcttaatcccgctttttaatttccaccgcacacgcaaatcagcaaatggttccagccacgtgcatgtgaccacatattgtggtcacagtactcgtcctttttttttcttttgtaatcaataaatttcaatcctaaaacttcacacattgagcacgtcggcaacgttagctcctaaatcataacgagcaaaaaagttcaaattagggtatatgatcaattgatcatcactacatgtctacataattaatatgtattcaaccggtcggtttgttgatactcatagttaagtatatatgtgctaattagaattaggatgaatcagttcttgcaaacaactacggtttcatataatatgggagtgttatgtacaaaatgaaagaggatggatcattctgagatgttatgggctcccagtcaatcatgttttgctcgcatatgctatcttttgagtctcttcctaaactcatagaataagcacgttggttttttccaccgtcctcctcgtgaacaaaagtacaattacattttagcaaattgaaaataaccacgtggatggaccatattatatgtgatcatattgcttgtcgtcttcgttttcttttaaatgtttacaccactacttcctgacacgtgtccctattcacatcatccttgttatatcgttttacttataaaggatcacgaacaccaaaacatcaatgtgtacgtcttttgcataagaagaaacagagagcattatcaattattaacaattacacaagacagcgagattgtaaaagagtaagagagagag

SEQ ID NO: 71 - DNA, 1000 bp, Arabidopsis thaliana
  misc_feature (1)..(1000): Ceres Promoter YP0381
cacggtcaaagtattgctaacatggtcattacattgaaaaagaaaattaattgtctttactcatgtttattctatacaaataaaaatattaaccaaccatcgcactaacaaaatagaaatcttattctaatcacttaattgttgacaattaaatcattgaaaaatacacttaaatgtcaaatattcgttttgcatacttttcaatttaaatacatttaaagttcgacaagttgcgtttactatcatagaaaactaaatctcctaccaaagcgaaatgaaactactaaagcgacaggcaggttacataacctaacaaatctccacgtgtcaattaccaagagaaaaaaagagaagataagcggaacacgtggtagcacaaaaaagataatgtgatttaaattaaaaaacaaaaacaaagacacgtgacgacctgacgctgcaacatcccaccttacaacgtaataaccactgaacataagacacgtgtacgatcttgtctttgttttctcgatgaaaaccacgtgggtgctcaaagtccttgggtcagagtcttccatgattccacgtgtcgttaatgcaccaaacaagggtactttcggtattttggcttccgcaaattagacaaaacagctttttgtttgattgatttttctcttctctttttccatctaaattctctttgggctcttaatttctttttgagtgttcgttcgagatttgtcggagattttttcggtaaatgttgaaattttgtgggatttttttttatttctttattaaacttttttttattgaatttataaaaagggaaggtcgtcattaatcgaagaaatggaatcttccaaaatttgatattttgctgttttcttgggatttgaattgctctttatcatcaagaatctgttaaaatttctaatctaaaatctaagttgagaaaaagagagatctctaatttaaccggaattaatattctccgaccgaagttattatgttgcaggct

SEQ ID NO: 72 - DNA, 999 bp, Arabidopsis thaliana
  misc_feature (1)..(999): Ceres Promoter YP0384
tttaaaaaattggataaaacaccgataaaaattcacatttgcaaattttattcagtcggaatatatatttgaaacaagttttgaaatccattggacgattaaaattcattgttgagaggataaatatggatttgttcatctgaaccatgtcgttgattagtgattgactaccatgaaaaatatgttatgaaaagtataacaacttttgataaatcacatttattaacaataaatcaagacaaaatatgtcaacaataatagtagtagaagatattaattcaaattcatccgtaacaacaaaaaatcataccacaattaagtgtacagaaaaaccttttggatatatttattgtcgcttttcaatgattttcgtgaaaaggatatatttgtgtaaaataagaaggatcttgacgggtgtaaaaacatgcacaattcttaatttagaccaatcagaagacaacacgaacacttctttattataagctattaaacaaaatcttgcctattttgcttagaataatatgaagagtgactcatcagggagtggaaaatatctcaggatttgcttttagctctaacatgtcaaactatctagatgccaacaacacaaagtgcaaattcttttaatatgaaaacaacaataatatttctaatagaaaattaaaaagggaaataaaatatttttttaaaatatacaaaagaagaaggaatccatcatcaaagttttataaaattgtaatataatacaaacttgtttgcttccttgtctctccctctgtctctctcatctctcctatcttctccatatatacttcatcttcacacccaaaactccacacaaaatatctctccctctatctgcaaattttccaaagttgcatcctttcaatttccactcctctctaatataattcacattttcccactattgctgattcatttttttttgtgaattatttcaaacccacataaaaaaatctttgtttaaatttaaaacca

SEQ ID NO: 73 - DNA, 998 bp, Arabidopsis thaliana
  misc_feature (1)..(998): Ceres Promoter YP0385
actcaacaataggacaagccaaaaaaattccaattattgtgttactctattcttctaaatttgaacactaatagactatgacatatgagtatataatgtgaagtcttaagatattttcatgtgggagatgaataggccaagttggagtctgcaaacaagaagctcttgagccacgacataagccaagttgatgaccgtaattaatgaaactaaatgtgtgtggttatatattagggacccatggccatatacacaatttttgtttctgtcgatagcatgcgtttatatatatttctaaaaaaactaacatatttactggatttgagttcgaatattgacactaatataaactacgtaccaaactacatatgtttatctatatttgattgatcgaagaattctgaactgttttagaaaatttcaatacacttaacttcatcttacaacggtaaaagaaatcaccactagacaaacaatgcctcataatgtctcgaaccctcaaactcaagagtatacattttactagattagagaatttgatatcctcaagttgccaaagaattggaagcttttgttaccaaacttagaaacagaagaagccacaaaaaaagacaaagggagttaaagattgaagtgatgcatttgtctaagtgtgaaaggtctcaagtctcaactttgaaccataataacattactcacactccctttttttttctttttttttcccaaagtaccctttttaattccctctataacccactcactccattccctctttctgtcactgattcaacacgtggccacactgatgggatccacctttcctcttacccacctcccggtttatataaacccttcacaacacttcatcgctctcaaaccaactctctcttctctcttctctcctctcttctacaagaagaaaaaaaacagagcctttacacatctcaaaatcgaacttactttaaccaccaaatactgattgaacacacttgaaa

SEQ ID NO: 74 - DNA, 1000 bp, Arabidopsis thaliana
  misc_feature (1)..(1000): Ceres Promoter YP0396
catagtaaaagtgaatttaatcatactaagtaaaataagataaaacatgttatttgaatttgaatatcgtgggatgcgtatttcggtatttgattaaaggtctggaaaccggagctcctataacccgaataaaaatgcataacatgttcttccccaacgaggcgagcgggtcagggcactagggtcattgcaggcagctcataaagtcatgatcatctaggagatcaaattgtatgtcggccttctcaaaattacctctaagaatctcaaacccaatcatagaacctctaaaaagacaaagtcgtcgctttagaatgggttcggtttttggaaccatatttcacgtcaatttaatgtttagtataatttctgaacaacagaattttggatttatttgcacgtatacaaatatctaattaataaggacgactcgtgactatccttacattaagtttcactgtcgaaataacatagtacaatacttgtcgttaatttccacgtctcaagtctataccgtcatttacggagaaagaacatctctgtttttcatccaaactactattctcactttgtctatatatttaaaattaagtaaaaaagactcaatagtccaataaaatgatgaccaaatgagaagatggttttgtgccagattttaggaaaagtgagtcaaggtttcacatctcaaatttgactgcataatcttcgccattaacaacggcattatatatgtcaagccaattttccatgttgcgtacttttctattgaggtgaaaatatgggtttgttgattaatcaaagagtttgcctaactaatataactacgactttttcagtgaccattccatgtaaactctgcttagtgtttcatttgtcaacaatattgtcgttactcattaaatcaaggaaaaatatacaattgtataattttcttatattttaaaattaattttgatgtattacccctttataaataggctatcgctacaacaccaataac

SEQ ID NO: 75 - DNA, 1514 bp, Arabidopsis thaliana
  misc_feature (1)..(1514): Ceres Promoter p13879
tttcgatcctcttcttttttaggtttcttgatttgatgatcgccgccagtagagccgtcgtcggaagtttcagagattaaaaccatcaccgtgtgagttggtagcgaattaacggaaagtctaagtcaagattttttaaaaagaaatttatgtgtgaaaagaagccgttgtgtatatttatataatttagaaaatgtttcatcattttaattaaaaaattaataatttgtagaagaaagaagcattttttatacataaatcatttaccttctttactgtgtttttcttcacttacttcatttttacttttttacaaaaaagtgaaaagtaaattacgtaattggtaacataaattcactttaaatttgcatatgttttgttttcttcggaaactatatcgaaaagcaaacggaaagaacttcacaaaaaaccctagctaactaaagacgcatgtgttcttcttattcttcatatatcctctgtttcttgtgttctgttttgagtcttacattttcaatatctgactctgattactatatctaaaagggaacatgaagaacttgagaccatgttaaactgtacaatgccttcaaacatggctaactaaagatacattagatggctttacagtgtgtaatgcttattatctttaggttttttaaatcccttgtattaagttatttaccaaattatgttcttgtactgcttattggcttggttgttgtgtgctttgtaaacaacacctttggctttatttcatcctttgtaaacctactggtctttgttcagctcctcttggaagtgagtttgtatgcctggaacgggttttaatggagtgtttatcgacaaaaaaaaaatgtagcttttgaaatcacagagagtagttttatattcaaattacatgcatgcaactaagtagcaacaaagttgatatggccgagttggtctaaggcgccagattaaggttctggtccgaaagggcgtgggttcaaatcccactgtcaacattctctttttctcaaattaatatttttctgcctcaatggttcaggcccaattatactagactactatcgcgactaaaatagggactagccgaattgatccggcccagtatcagttgtgtatcaccacgttatttcaaatttcaaactaagggataaagatgtcatttgacatatgagatatttttttgctccactgagatatttttctttgtcccaagataaaatatcttttctcgcatcgtcgtctttccatttgcgcattaaaccaaaaagtgtcacgtgatatgtccccaaccactacgaattttaactacagatttaaccatggttaaaccagaattcacgtaaaccgactctaaacctagaaaatatctaaaccttggttaatatctcagcccccttataaataacgagacttcgtctacatcgttctacacatctcactgctcactactctcactgtaatcccttagatcttcttttcaaatttcaccattgcactggatg

SEQ ID NO: 76 - DNA, 1954 bp, Arabidopsis thaliana
  misc_feature (1)..(1954): Ceres Promoter p326
gtgggtaaaagtatccttctttgtgcatttggtatttttaagcatgtaataagaaaaaccaaaatagacggctggtatttaataaaaggagactaatgtatgtatagtatatgatttgtgtggaatataataaagttgtaaaatatagatgtgaagcgagtatctatcttttgactttcaaaggtgatcgatcgtgttctttgtgatagttttggtcgtcggtctacaagtcaacaaccaccttgaagttttcgcgtctcggtttcctcttcgcatctggtatccaatagcatacatataccagtgcggaaaatggcgaagactagtgggcttgaaccataaggtttggccccaatacggattccaaacaacaagcctagcgcagtcttttgggatgcataagactaaactgtcgcagtgatagacgtaagatatatcgacttgattggaatcgtctaagctaataagtttaccttgaccgtttatagttgcgtcaacgtccttatggagattgatgcccatcaaataaacctgaaaatccatcaccatgaccaccataaactcccttgctgccgctgctttggcttgagcaaggtgtttccttgtaaagctccgatctttggataaagtgttccactttttgcaagtagctctgacccctctcagagatgtcaccggaatcttagacagaacctcctctgccaaatcacttggaagatcggacaatgtcatcatttttgcaggtaatttctccttcgttgctgctttggcttgagcacggtgcttctttgtaaagctccgatctttggataagagcggatcggaatcctctaggaggtgccagtcccttgacctattaatttatagaaggttttagtgtattttgttccaatttcttctctaacttaacaaataacaactgcctcatagtcatgggcttcaaattttatcgcttggtgtatttcgttatttgcaaggccttggcccattttgagcccaataactaaatctagccttttcagaccggacatgaacttcgcatattggcgtaactgtgcagttttacctttttcggatcagacaagatcagatttagaccacccaacaatagtcagtcatatttgacaacctaagctagccgacactactaaaaagcaaacaaaagaagaattctatgttgtcattttaccggtggcaagtggacccttctataaaagagtaaagagacagcctgtgtgtgtataatctctaattatgttcaccgacacaatcacacaaacccttctctaatcacacaacttcttcatgatttacgacattaattatcattaactctttaaattcactttacatgctcaaaaatatctaatttgcagcattaatttgagtaccgataactattattataatcgtcgtgattcgcaatcttcttcattagatgctgtcaagttgtactcgcacgcggtggtccagtgaagcaaatccaacggtttaaaaccttcttacatttctagatctaatctgaaccgtcagatatctagatctcattgtctgaacacagttagatgaaactgggaatgaatctggacgaaattacgatcttacaccaaccccctcgacgagctcgtatatataaagcttatacgctcctccttcaccttcgtactactactaccaccacatttctttagctcaaccttcattactaatctccttttaaggtatgttcacttttcttcgattcatactttctcaagattcctgcatttctgtagaatttgaaccaagtgtcgatttttgtttgagagaagtgttgatttatagatctggttattgaatctagattccaatttttaattgattcgagtttgttatgtgtgtttatactacttctcattgatcttgtttgatttctctgctctgtattaggtttctttcgtgaatcagatcggaa

SEQ ID NO: 77 - DNA, 2016 bp, Arabidopsis thaliana
  misc_feature (1)..(2016): Ceres Promoter p32449
gatcggccttcttcaggtcttctctgtagctctgttacttctatcacagttatcgggtatttgagaaaaaagagttagctaaaatgaatttctccatataatcatggtttactacaggtttacttgattcgcgttagctttatctgcatccaaagttttttccatgatgttatgtcatatgtgataccgttactatgtttataactttatacagtctggttcactggagtttctgtgattatgttgagtacatactcattcatcctttggtaactctcaagtttaggttgtttgaattgcctctgttgtgatacttattgtctattgcatcaatcttctaatgcaccaccctagactatttgaacaaagagctgtttcattcttaaacctctgtgtctccttgctaaatggtcatgctttaatgtcttcacctgtctttctcttctatagatatgtagtcttgctagatagttagttctacagctctcttttgtagtcttgttagagagttagttgagatattacctcttaaaagtatccttgaacgctttccggttatgaccaatttgttgtagctccttgtaagtagaacttactgggaccagcgagacagtttatgtgaatgttcatgcttaagtgtcgaacgtatctatctctactatagctctgtagtcttgttagacagttagttttatatctccatttttttgtagtcttgctagttgagatattacctcttctcttcaaagtatccttgaacgctcaccggttatgaaatctctacactatagctctgtagtcttgctagatagttagttctttagctctctttttgtagcctagttctttagctctccttttgtagccttgctacagagtaagatgggatattacctccttgaacgctctccggttatgaccaatttgttgtagctccttgtaagtagaacttaggatagagtgagtcaactttaagaaagaacctagtatgtggcataaccagattgcaggctctgtctcggctacagtaacgtaactctatagctctttgttttgttcagaaagaaccagtgattggatgattcgtccttagaaactggacctaacaacagtcattggctttgaaatcaagccacaacaatgcctatatgaaccgtccatttcatttatccgtttcaaaccagcccattacatttcgtcccattgataaccaaaagcggttcaatcagattatgttttaattttaccaaattctttatgaagtttaaattatactcacattaaaaggattattggataatgtaaaaattctgaacaattactgattttggaaaattaacaaatattctttgaaatagaagaaaaagcctttttccttttgacaacaacatataaaatcatactcccattaaaaagattttaatgtaaaattctgaatataagatattttttacaacaacaaccaaaaatatttatttttttccttttttacagcaacaagaaggaaaaacttttttttttgtcaagaaaaggggagattatgtaaacagataaaacagggaaaataactaaccgaactctcttaattaacatcttcaaataaggaaaattatgatccgcatatttaggaagatcaatgcattaaaacaacttgcacgtggaaagagagactatacgctccacacaagttgcactaatggtacctctcacaaaccaatcaaaatactgaataatgccaacgtgtacaaattagggttttacctcacaaccatcgaacattctcgaaacattttaaacagcctggcgccatagatctaaactctcatcgaccaatttttgaccgtccgatggaaactctagcctcaacccaaaactctatataaagaaatcttttccttcgttattgcttaccaaatacaaaccctagccgccttattcgtcttcttcgttctctagttttttcctcagtctctgttcttagatcccttgtagtttccaaatcttccgataaggcct

SEQ ID NO: 78 - DNA, 667 bp, Arabidopsis thaliana
  misc_feature (1)..(667): Ceres Promoter PD1367
acagttttcttttctcatcttacaacaagtttccaggaggatagagacataaacgaagctcggattgtatcgttctttttagcttttattcacatccgaaagtcctgtagtttagattctgttatcttgcggttttgagttaatcagaaacagagtaatcaatgtaatgttgcaggctagatctttcatctttggaaatttgtttttttctcatgcaatttctttagcttgaccatgagtgactaaaagatcaatcagtagcaatgatttgatttggctaagagacatttgtccacttggcatcttgatttggatggttacaacttgcaagacccaattggatacttgctatgacaactccaactcaagagtgtcgtgtaactaagaaccttgactaatttgtaatttcaatcccaagtcatgttactatatgtttttttgtttgtattattttctctcctacaattaagctctttgacgtacgtaatctccggaaccaactcctatatccaccatttactccacgttgtctccaattattggacgttgaaacttgacacaacgtaaacgtatctacgtggttgattgtatgtacatatgtacaaacgtacacctttctcctctttcacttcatcacttggcttgtgaattcattaattcctgcgaa

SEQ ID NO: 79 - DNA, 1504 bp, Arabidopsis thaliana
  misc_feature (1)..(1504): Ceres CLONE ID no. 34553
  misc_feature (1)..(1504): Ceres SEED LINE: ME03037
  CDS (221)..(1207): Encodes the peptide sequence given in SEQ ID NO. 80
atagccattttagttactctggtttgtttctcatcccattctctctctctttctctaatggttcttaatctgttttagcattttgatcatctaaaactttcaatttctctcttgatcctcacttgaattttttgttgtttctctcaaatctttgatcctttcctttgtttttcatttgacctcttacaaaaaaatctggtgtgccattaaatctttattaatggcacaacttcctccgaaaatcccaaccatgacgacgccaaattggcctgacttctcctcccagaaactcccttccatagccgcaacggcggcagccgcagcaaccgctggacctcaacaacaaaacccttcatggatggatgagtttctcgacttctcagcgactcgccgtgggactcaccgtcgttctataagcgactccattgctttccttgaaccaccttcctccggcgtcggaaaccaccacttcgataggtttgacgacgagcaattcatgtccatgttcaacgacgacgtacacaacaataaccacaatcatcatcatcatcacagcatcaacggcaatgtgggtcccacgcgttcatcctccaacacctccacgccgtccgatcataatagccttagcgacgacgacaacaacaaagaagcaccaccgtccgatcatgatcatcacatggacaataatgtagccaatcaaaacaacgccgccggtaacaattacaacgaatcagacgaggtccaaagccagtgcaagacggagccacaagatggtccgtcggcgaatcaaaactccggtggaagctccggtaatcgtattcacgaccctaaaagggtaaaaagaattttagcaaataggcaatcagcacagagatcaagggtgaggaaattgcaatacatatcagagcttgaaaggagcgttacttcattgcagactgaagtgtcagtgttatcgccaagagttgcgtttttggatcatcagcgattgcttctcaacgtcgacaatagtgctatcaagcaacgaatcgcagctttagcacaagataagattttcaaagacgctcatcaagaagcattgaagagagaaatagagagacttcgacaagtatatcatcaacaaagcctcaagaagatggagaataatgtctccgatcaatctccggccgatatcaaaccgtccgttgagaaggaacagctcctcaatgtctaaagctgttcgttcactaagatctttcttttcatggcgaaaagattcttgactataaaacctctttgtgtcaagaaattaatttatcaaagaagatggccttttttatttgatctaatcacatttttttaagttgtgatgaatttgcttttgatgtatctgtttttttttttttttcttatggagtgggagggggaaagtgggaatgatatgtaaaaagaacttagctgatttgttgtttattcaatttttttgttggagtgtctatgcattgtgtactaattgatattttttccg

SEQ ID NO: 80 - protein, 329 aa, Arabidopsis thaliana
  misc_feature (1)..(329): Ceres CLONE ID no. 34553
  misc_feature (1)..(329): Ceres SEED LINE: ME03037
  misc_feature: Score of 726.3 for HMM of FIGURE 1
  misc_feature (200)..(254): Pfam Name: bZIP_2 Pfam Description: Basic region leucine zipper
MAQLPPKIPTMTTPNWPDFSSQKLPSIAATAAAAATAGPQQQNPSWMDEFLDFSATRRGTHRRSISDSIAFLEPPSSGVGNHHFDRFDDEQFMSMFNDDVHNNNHNHHHHHSINGNVGPTRSSSNTSTPSDHNSLSDDDNNKEAPPSDHDHHMDNNVANQNNAAGNNYNESDEVQSQCKTEPQDGPSANQNSGGSSGNRIHDPKRVKRILANRQSAQRSRVRKLQYISELERSVTSLQTEVSVLSPRVAFLDHQRLLLNVDNSAIKQRIAALAQDKIFKDAHQEALKREIERLRQVYHQQSLKKMENNVSDQSPADIKPSVEKEQLLNV

SEQ ID NO: 81 - protein, 340 aa, Glycine max
  misc_feature (1)..(340): Ceres CLONE ID no. 473423
  misc_feature (202)..(256): Pfam Name: bZIP_2 Pfam Description: Basic region leucine zipper
  misc_feature: Score of 703.4 for HMM of FIGURE 1
  misc_feature (1)..(340): Functional Homolog of  Ceres CLONE ID no. 34553 at SEQ ID NO. 80 with e-value of 4.00E-90 and BLAST sequence identity of 69.0
MAQLPPKIPNMTPNWPDFSSPHQKMPSLKTMSPNQNPSWVDEFLEFSAARRGAHRRSVSDSITFLEAPLLDHHHCKGGSVGGGGGSGDNEFERFDDEQFMSMFSDEASGNNNNNNNNNNNNNNTMMENALSSSNPSTPSDHNSINDEKEMNNKEEEGKKQVKNESEEDEDESQCKQEITQLPNNDDSKNNSNANATCSSEKITDPKRVKRILANRQSAQRSRVRKLQYISELERSVTSLQAEVSVLSPRVAFLDHQRLLLNVDNSALKQRIAALAQDKIFKDAHQEALKREIERLRQVYHQQNIKKMDNAAGSPPSQSPPSPSPKPRCETHTEKEQLINV

SEQ ID NO: 82 - protein, 311 aa, Glycine max
  misc_feature (1)..(311): Ceres CLONE ID no. 614555
  misc_feature (178)..(232): Pfam Name: bZIP_2 Pfam Description: Basic region leucine zipper
  misc_feature: Score of 565.4 for HMM of FIGURE 1
  misc_feature (1)..(311): Functional Homolog of  Ceres CLONE ID no. 34553 at SEQ ID NO. 80 with e-value of 6.50E-83 and BLAST sequence identity of 68.8
MTQLPPKIPNMSPSWPDFSSHHQKMQLPPLKSGSNNNYQHNQNPSWVDEFLDFSSARRGAHRRSVSDSITYLDSPMKCGENNNNNENEFDKFDDEQFMSMFTDEVVLSGVPLLPPTILSSSNPSSPSDQNFFNDEKEKKEEHHHHQLKNEADEVESQCKQEIMQLPNDTNTCSSNERITDPKRVKRILANRQSAQRSRVRKLQYISELERSVTSLQAEVSVLSPRVAFLDHQRLLLNVDNSALKQRIAALAQDKIFKDAHQEALKREIERLRQVYHQQSLKKMENAAGSPLPSPKPICDAQTEKEATLLNA

SEQ ID NO: 83 - protein, 239 aa, Triticum aestivum
  misc_feature (1)..(239): Ceres CLONE ID no. 1329993
  misc_feature (108)..(162): Pfam Name: bZIP_2 Pfam Description: Basic region leucine zipper
  misc_feature: Score of 413 for HMM of FIGURE 1
  misc_feature (1)..(239): Functional Homolog of  Ceres CLONE ID no. 34553 at SEQ ID NO. 80 with e-value of 1.60E-43 and BLAST sequence identity of 66.6
MAQLPPRAPSAGEQDWPVAGEFLGFAAARRGVHRRSASDPAAFLEAVPMDHILSGGGGDDEFDRLDDEQLMSMFSNVDGGCDRPGFMDTGEAEEGAASAGAMTAADGFGDPKRVKRILANRQSAQRSRVRKLQYISELERSVTGLQMEVSALSPRVAFLDHQRSLLTVGNSHLRQRIAALAQDKIFKDAHQEALKEEIERLRQLFHHQKIKATGGTDMATAASMQAKQELLMCEGAAMR

SEQ ID NO: 84 - protein, 256 aa, Zea mays
  misc_feature (1)..(256): Ceres CLONE ID no. 258825
  misc_feature (152)..(206): Pfam Name: bZIP_2 Pfam Description: Basic region leucine zipper
  misc_feature: Score of 504.4 for HMM of FIGURE 1
  misc_feature (1)..(256): Functional Homolog of  Ceres CLONE ID no. 34553 at SEQ ID NO. 80 with e-value of 5.50E-54 and BLAST sequence identity of 58.2
  misc_feature (118)..(118): Xaa is any aa, unknown, or other
  misc_feature (151)..(151): Xaa is any aa, unknown, or other
MAQLPPRVPTAVHRWPEGGHHGAAAWANDFAEFAASRRGAHRRSLSDSVAFVEVAPAAGEFDRLDDDQLMSMFPDEAAAGGGGGGSSAAGSENNGGSSDSYGDRRGGGGPAAGGTSTXTSCNGFDGGEHNEAADAQATGQAAAAAAASTEXIRDPKRVKRILANRQSAQRSRVRKLQYISELERSVTTLQNEVSALSPRVAFLDQQRTILTVGNSHLKQRIAALAQDKIFKDAHQEALKKEIERLRQVYEQQNLKM

SEQ ID NO: 85 - protein, 287 aa, Oryza sativa subsp. japonica
  misc_feature (1)..(287): Public GI no. 34903896
  misc_feature (149)..(203): Pfam Name: bZIP_2 Pfam Description: Basic region leucine zipper
  misc_feature: Score of 490.9 for HMM of FIGURE 1
  misc_feature (1)..(287): Functional Homolog of  Ceres CLONE ID no. 34553 at SEQ ID NO. 80 with e-value of 2.19E-66 and BLAST sequence identity of 64.9
MGAFLAAPLPPFPLPPPAPANGGAQQQQQQQQHQPSWVDEFLDFSATKRGAHRRSVSDSVAFLDPVSDDNAGVGAHDFDRLDDDQLMSMFSDDLQPPPPQQQPAAPAASASSPSDHNSMNDEKQDKGETDEAQSECDGATPGQPASPATVDPKRVKRILANRQSAQRSRVRKLQYISELERSVTSLQTEVSALSPRVAFLDHQRSLLTLGNSHLKQRIAALAQDKIFKDAHQEALKKEIERLRQIYHQQSLKNAESQPADAAPVRGRDNADLIGSEGAAAAAPCPHS

SEQ ID NO: 86 - protein, 265 aa, Oryza sativa subsp. japonica
  misc_feature (1)..(265): Public GI no. 57900348
  misc_feature (135)..(189): Pfam Name: bZIP_2 Pfam Description: Basic region leucine zipper
  misc_feature: Score of 461.6 for HMM of FIGURE 1
  misc_feature (1)..(265): Functional Homolog of  Ceres CLONE ID no. 34553 at SEQ ID NO. 80 with e-value of 5.10E-51 and BLAST sequence identity of 62.8
MAQLPPKIPVAAPGHHQHWASAGGAGDAAWADEFAEFAASRRGAHRRSLSDSVAFVEVAPAGCGAGGEFDRLDDDQLMSMFPDEGGSSAPGSDNGGSDSDGGGDKHAAAQSDDGQHAAGEPTQEQAAATSPTELIRDPKRVKRILANRQSAQRSRVRKLQYISELERSVTTLQNEVSVLSPRVAFLDQQRTILTVGNSHLKQRIAALAQDKIFKDAHQEALRKEIERLRQVYQQQNTKLSGGLAADHAHVHGGPPPVRAEKELMS

SEQ ID NO: 87 - protein, 269 aa, Oryza sativa subsp. japonica
  misc_feature (1)..(269): Public GI no. 50906641
  misc_feature (138)..(192): Pfam Name: bZIP_2 Pfam Description: Basic region leucine zipper
  misc_feature: Score of 571.1 for HMM of FIGURE 1
  misc_feature (1)..(269): Functional Homolog of  Ceres CLONE ID no. 34553 at SEQ ID NO. 80 with e-value of 4.70E-48 and BLAST sequence identity of 62.3
MAQLPPRAPSAAAAAGQEWSAMAAAGEFLGFAAARRGAHRRSASDSAAFLMEAAVPMDDVIVGVGGGGEFDRLDDEQLMSMFSDVEAPAVSDGGGERGPAGEAHLMDMGDGDDGMGATSPAGAGAMAAAAAAAAADGIADPKRVKRILANRQSAQRSRVRKLQYISELERSVTTLQMEVSALSPRVAFLDHQRSLLTVGNSHLKQRIAALAQDKIFKDAHQEALKKEIERLRQVYHQQQIKATGGADIATAASMQAKHELLACEGAAMR

SEQ ID NO: 88 - DNA, 1345 bp, Arabidopsis thaliana
  misc_feature (1)..(1345): Ceres CLONE ID no. 21863
  misc_feature (1)..(1345): Ceres SEED LINE: ME04864
  CDS (84)..(815): Encodes the peptide sequence given in SEQ ID NO. 89
aaacctctctgtcattactctggtcagcgattcttctttcttcttcttctcagatcctttcaccgagtaagaagattttaaagatgccgtcaacgccgacgacgccgactacaacaacgccgatcacggcttcgtattggtgttacagctgtacgcgtttcgtcagcgtttgggctgatcaaggcacaacaaccgtcggtagcgtcgcttgccctcactgcgacggcggttttatcgaacagattaacgattcttcctccgccgctaccgaattaacgattccggcttctactgaagtaagatcgatcaataacaaccgtagatccgtgattagacgccggagatccggtcgtcgtccgtcctttaatccggtcatcgtacttcaaggaggcgccggcgagagagaagagggagaagaaggagatgcggctagagatcgacgcgcttttgagttttattacgatgacggatccggatcgggtcttagaccgcttccggattctgtatctgagatcttgatgggatctggattcgagcggttacttgaacagctaagccaaatcgaagcgtcggctactggaattggtagatctggaaaccctccggcgtctaaatcggcgattgagtctttacctagagtcgaaatctcggattgccacataggctcggaggctaattgcgctgtttgcacggagattttcgagacggagacggaggcgcgtgagatgccgtgtaaacaccttttccacgacgattgcatcgtaccgtggctatcgattcgaaactcttgtcccgtgtgcagattcgagctaccttaagagcctaatcgacggagcaacaacaacgaggaggataacgccgtggggatgacgatttggagacttcccggtggtggattcgccgtagggaggtttaacgcagcaatgagagacggagagagagttttgccagtggtgttaacagaaatggatggtggtgggattggtaatagccaggatggtcctagacggatctcatgggttaggtcacacggtacactcgaatcggatagtaacggtactggctcaggttccggctccggtggaagattgaggaggatggttcgtggaatggtgtcgttaatgaggagagtgagaccaaaccgtagctcttcttcttcatcagctgcgatatcaacttcttctgataatctggatttgaacattgaagtagaatctagggttttggataggtcaaattcagtgatgagaagatacttcagaagaaacagaagtaacagggattcttcgtcttcagttcttcattgattcagaaatatatatatatattattttttggtttgtcc

SEQ ID NO: 89 - protein, 244 aa, Arabidopsis thaliana
  misc_feature (1)..(244): Ceres CLONE ID no. 21863
  misc_feature (1)..(244): Ceres SEED LINE: ME04864
  misc_feature: Score of 516.4 for HMM of FIGURE 5
  misc_feature (199)..(239): Pfam Name: zf-C3HC4 Pfam Description: Zinc finger, C3HC4 type (RING finger)
MPSTPTTPTTTTPITASYWCYSCTRFVSVWADQGTTTVGSVACPHCDGGFIEQINDSSSAATELTIPASTEVRSINNNRRSVIRRRRSGRRPSFNPVIVLQGGAGEREEGEEGDAARDRRAFEFYYDDGSGSGLRPLPDSVSEILMGSGFERLLEQLSQIEASATGIGRSGNPPASKSAIESLPRVEISDCHIGSEANCAVCTEIFETETEAREMPCKHLFHDDCIVPWLSIRNSCPVCRFELP

SEQ ID NO: 90 - DNA, 858 bp, Brassica napus
  misc_feature (1)..(858): Ceres CLONE ID no. 968026
  misc_feature (1)..(858): Ceres SEED LINE: ME05220
  CDS (71)..(640): Encodes the peptide sequence given in SEQ ID NO. 91
atcatccaactttgagtataacatttaattttgctcttctctctattctcttaaagatccaatatatcgcatggctgaggttatgctaccgatgaaaatggagatggctaacgatccttccaagtttacatcacctgatcttcttcatgttctcgccgtcgacgacagtcacgttgatcggaaattcatagaacgcttgctcaaagtctcttcctgtaaagttaccgttgttgatagtgcgacaagagctctgcaataccttggactagacgtaaacgagaaacccatcggttgtaaggatttgaaagttaatttgatcatgacggattactctatgcccggaatgactggatatgaactcttgaagaagatcaaagaatcgtcagctttcagagatgtgcctgtggtggttatgtcatctgagaacattttgtctcgtattgatagatgtcttgaagaaggggctgaagatttcttactgaagccggtaaaactctcggatgtaagaagaataagagattctctgattaaagttgaagatttatctttcacaaagagtattaacaagagagagctagaaacagagaatgtctactccttggactcatctgttcccttgcagctcaaacgcacaaagatctgagctttcccaagcagactaccatgacatgatctttaaaaagcttaatcacctatacaattttccaccccctggtgtctttttttttgctgagtaaaaaactcagtgttgacagagaaacagggcttattcatagactatgttagcaatgtaaatggtagagataaaccacaaaactattatattattattcattagagatgtcatgttttttttct

SEQ ID NO: 91 - protein, 190 aa, Brassica napus
  misc_feature (1)..(190): Ceres CLONE ID no. 968026
  misc_feature (1)..(190): Ceres SEED LINE: ME05220
  misc_feature: Score of 465.3 for HMM of FIGURE 2
  misc_feature (25)..(144): Pfam Name: Response_reg Pfam Description: Response regulator receiver domain
MAEVMLPMKMEMANDPSKFTSPDLLHVLAVDDSHVDRKFIERLLKVSSCKVTVVDSATRALQYLGLDVNEKPIGCKDLKVNLIMTDYSMPGMTGYELLKKIKESSAFRDVPVVVMSSENILSRIDRCLEEGAEDFLLKPVKLSDVRRIRDSLIKVEDLSFTKSINKRELETENVYSLDSSVPLQLKRTKI

SEQ ID NO: 92 - protein, 186 aa, Arabidopsis thaliana
  misc_feature (1)..(186): Public GI no. 28466913
  misc_feature (25)..(149): Pfam Name: Response_reg Pfam Description: Response regulator receiver domain
  misc_feature: Score of 460.1 for HMM of FIGURE 2
  misc_feature (1)..(186): Functional Homolog of  Ceres CLONE ID no. 968026 at SEQ ID NO. 91 with e-value of 1.59E-77 and BLAST sequence identity of 87.0
MAEVMLPRKMEILNHSSKFGSPDPLHVLAVDDSHVDRKFIERLLRVSSCKVTVVDSATRALQYLGLDVEEKSVGFEDLKVNLIMTDYSMPGMTGYELLKKIKESSAFREVPVVIMSSENILPRIDRCLEEGAEDFLLKPVKLSDVKRLRDSLMKVEDLSFTKSIQKRELETENVYPVHSQLKRAKI

SEQ ID NO: 93 - protein, 196 aa, Glycine max
  misc_feature (1)..(196): Ceres CLONE ID no. 596510
  misc_feature (21)..(146): Pfam Name: Response_reg Pfam Description: Response regulator receiver domain
  misc_feature: Score of 488 for HMM of FIGURE 2
  misc_feature (1)..(196): Functional Homolog of  Ceres CLONE ID no. 968026 at SEQ ID NO. 91 with e-value of 1.40E-51 and BLAST sequence identity of 70.5
MASAGYVFRQGLPEVCAAGKLHVLAVDDSHVDRKVIERLLKISSCKVTVVESGSRALQYLGLDGEKSSIGLDSVKVNLIMTDYSMPGMTGYELLKKIKESSVFREVPVVVMSSENILTRIDSCLEEGAEEFLLKPVKLSDVKRVTDFIMRGEGMKGVKISKKRSRSDDCIPSLSTAFSSVSHPCDISSPPSPTEEI

SEQ ID NO: 94 - DNA, 1190 bp, Arabidopsis thaliana
  misc_feature (1)..(1190): Ceres CLONE ID no. 34589
  misc_feature (1)..(1190): Ceres CDNA ID no. 23369236
  misc_feature (1)..(1190): Ceres SEED LINE: ME01130
  CDS (232)..(1044): Encodes the peptide sequence given in SEQ ID NO. 95
ataaaagaccattctacttctatatatatatatagtgtgagtgagacagagcctcacataaataaaaagtctcctaatctgaatacaactattactaacaataattcacttatctaaagaccatcatctgactgactctacgctgaatcatcacgaggaagaacttgaatcgaccggagaagagatacgtgtagagatctgattggctcaccggagagaacaaaacaagaaatggggaggacgacgtggttcgacgttgacgggttgaggaaaggagagtggacggcggaggaagaccggaagctcgtggtttacatcaacgaacacggtctaggcgagtggggttcactgcctaagagagccggtctacaaagatgtggaaagagttgtagattaagatggctgaattatttgaggcctgggattaaaagaggcaagttcactcctcaggaggaagaagaaatcatcaaataccatgctcttcttggaaacaggtgggcagcaatagctaagcaaatgccaaacagaacagacaataacataaagaaccattggaactcatgccttaagaaaagacttgctaaaaaaggaatcgatccaatgacccatgagccaacaacaacaacaagcctcaccgtcgatgtcacctcctcatcaactacgtcgtctcctacaccgagccctacttcttcttctttttcctcctgttcctctactggctctgcacgtttccttaacaagctcgctgctggaatctcgtcaagaaaacacggactagagagtatcaagacagtgatattggcagaacaaccaagagaagccgttgatgaagagaagatgatgacaattaacatgaaagagaaggaattgattagttgttacatggagattgatgagacgatgagtattgatgaactaccttgtgatgactcgacgtctggcttcgtggcttttgacgactactcattaatcgacccatacagagacagtgtgtacgtatctgatttctacgatgagactgaacaccttgacctgttccttctttgaatcacatttcctttgtctaaataaatccgcttctttagtgtgacgagagagacagtggagagagatgtctgaaaaaaacaagtgctgattagtactttgaatgacatgcatggtcaatgttgttttacagctttgagcctttg

SEQ ID NO: 95 - protein, 271 aa, Arabidopsis thaliana
  misc_feature (1)..(1193): Ceres CLONE ID no. 34589
  misc_feature (1)..(271): Ceres CDNA ID no. 23369236
  misc_feature (1)..(271): Ceres SEED LINE: ME01130
  misc_feature: Score of 560.4 for HMM of FIGURE 4
  misc_feature (67)..(112): Pfam Name: Myb_DNA-binding Pfam Description: Myb-like DNA-binding domain
MGRTTWFDVDGLRKGEWTAEEDRKLVVYINEHGLGEWGSLPKRAGLQRCGKSCRLRWLNYLRPGIKRGKFTPQEEEEIIKYHALLGNRWAAIAKQMPNRTDNNIKNHWNSCLKKRLAKKGIDPMTHEPTTTTSLTVDVTSSSTTSSPTPSPTSSSFSSCSSTGSARFLNKLAAGISSRKHGLESIKTVILAEQPREAVDEEKMMTINMKEKELISCYMEIDETMSIDELPCDDSTSGFVAFDDYSLIDPYRDSVYVSDFYDETEHLDLFLL

SEQ ID NO: 96 - protein, 267 aa, Brassica napus
  misc_feature (1)..(267): Ceres CLONE ID no. 975220
  misc_feature: Score of 423.6 for HMM of FIGURE 4
  misc_feature (27)..(74): Pfam Name: Myb_DNA-binding Pfam Description: Myb-like DNA-binding domain
  misc_feature (1)..(267): Functional Homolog of  Ceres CLONE ID no. 34589 at SEQ ID NO. 95 with e-value of 4.70E-73 and BLAST sequence identity of 63.4
  misc_feature (175)..(175): Xaa is any aa, unknown, or other
  misc_feature (185)..(185): Xaa is any aa, unknown, or other
  misc_feature (217)..(217): Xaa is any aa, unknown, or other
  misc_feature (218)..(218): Xaa is any aa, unknown, or other
  misc_feature (255)..(255): Xaa is any aa, unknown, or other
MNVAVIGLVGLRKMGRKTWVDGDGMKKGEWTAEEDQNLVAYINEHGVSDWRSLPKRAGLQRCGKSCRLRWLNYLRPGIKRGKFTPQEEEEIIKLHAVLGNRWAAIAKEMDNRTDNDIKNHWNSCLKKRLSRKGIDPMTHEPIINNLTVTITNEECGSSSITTFSPTSSPSGSACXLNKLATGISXRQHDLDKIKSILLEPRIASSDQDEKEEVKRDXXIGGGEEGDDFLIWDDEEVRRFMESDEMEYGTTPYVSXFYESTHVLDDLL

SEQ ID NO: 97 - DNA, 756 bp, Zea mays
  misc_feature (1)..(756): Ceres CLONE ID no. 316638
  misc_feature (1)..(756): Ceres CDNA ID no. 23767585
  misc_feature (1)..(756): Ceres SEED LINE: ME12093
  CDS (126)..(407): Encodes the peptide sequence given in SEQ ID NO. 98
attccgttccgagagccaaaaactccactgctttcatcaactccggcgacttggagaagacgaagttccagaatccgatcggaagtttggtgctcgcgccttgacggattgatttcggtgcgccgatggggcaggcgttccgcaagctgttcgattccttcttcggcaccagcgagatgagggttgtgatgcttggtctggatgctgccggtaaaaccaccatattgtacaagctgcatatcggggaggttttgtcgactgttcccacgattggtttcaacgtcgagaaagttcaatacaagaatgtgatgtttactgtgtgggatgttggtggccaagaaaagttgagggtgactacgtccgcaaaggagatgagtttgggtatttctcctttggagggagtacagtgatatgcgtcttcgagaaggacgccatccaatttgacgctgatctcgtggcaaacagcgaaaggtcactggagaccaagtcccggatctgcagaaagtttcgctcggatgacagacagagctgtaaactgtgtgcaggttaacagtagcgtatatttgatactagcaactgccactggtaggcaatactattatcacataatccaagactacatgtatagtcaggctagaggagtctggtttacggcggtgggcgtgggcatgggcattggcccagctgtcatcggctgagagctcactgcatggctcggtggtttttgcaatgacgatactaaccgtgcagttgctc

SEQ ID NO: 98 - protein, 94 aa, Zea mays
  misc_feature (1)..(94): Ceres CLONE ID no. 316638
  misc_feature (1)..(94): Ceres CDNA ID no. 23767585
  misc_feature (1)..(94): Ceres SEED LINE: ME12093
  misc_feature (5)..(75): Pfam Name: Arf Pfam Description: ADP-ribosylation factor family
  misc_feature: Score of 112.3 for HMM of FIGURE 8
MGQAFRKLFDSFFGTSEMRVVMLGLDAAGKTTILYKLHIGEVLSTVPTIGFNVEKVQYKNVMFTVWDVGGQEKLRVTTSAKEMSLGISPLEGVQ

SEQ ID NO: 99 - protein, 113 aa, Oryza sativa subsp. japonica
  misc_feature (1)..(113): Public GI no. 78709067
  misc_feature (5)..(108): Pfam Name: Arf Pfam Description: ADP-ribosylation factor family
  misc_feature: Score of 231.5 for HMM of FIGURE 9
  misc_feature (1)..(113): Functional Homolog of  Ceres CLONE ID no. 316638 at SEQ ID NO. 98 with e-value of 8.69E-33 and BLAST sequence identity of 94.6
MGQAFRKLFDAFFGNKEMRVVMLGLDAAGKTTILYKLHIGEVLSTVPTIGFNVEKVQYKNVVFTVWDVGGQEKLRPLWRHYFNNTDALIYVVDSLDRERIGRARAEFQVYIYV

SEQ ID NO: 100 - protein, 106 aa, Brassica napus
  misc_feature (1)..(106): Ceres CLONE ID no. 973476
  misc_feature (5)..(106): Pfam Name: Arf Pfam Description: ADP-ribosylation factor family
  misc_feature: Score of 219.1 for HMM of FIGURE 9
  misc_feature (1)..(106): Functional Homolog of  Ceres CLONE ID no. 316638 at SEQ ID NO. 98 with e-value of 5.20E-33 and BLAST sequence identity of 94.6
MGQTFRKLFDTFFGNQEMRVVMLGLDAAGKTTILYKLHIGEVLSTVPTIGFNVEKVQYKNVMFTVWDVGGQEKLRPLWRHYFNNTDGLIYVVDSLDRERIGKAKQE

SEQ ID NO: 101 - protein, 96 aa, Triticum aestivum
  misc_feature (1)..(96): Ceres CLONE ID no. 911175
  misc_feature (5)..(96): Pfam Name: Arf Pfam Description: ADP-ribosylation factor family
  misc_feature: Score of 132.7 for HMM of FIGURE 9
  misc_feature (1)..(96): Functional Homolog of  Ceres CLONE ID no. 316638 at SEQ ID NO. 98 with e-value of 1.10E-30 and BLAST sequence identity of 86.6
MGQALRRLFDSFFSTKEMRVVMLGLDSAGKTTILYRLHLGEVLQTVPTVGFNVEKVQYKNVAFTVWDVGGQEKLRQLWRMYLSNSDALIYVVDSLD

SEQ ID NO: 102 - protein, 87 aa, Nicotiana tabacum
  misc_feature (1)..(87): Public GI no. 1184987
  misc_feature: Score of 70.5 for HMM of FIGURE 9
  misc_feature (5)..(87): Pfam Name: Arf Pfam Description: ADP-ribosylation factor family
  misc_feature (1)..(87): Functional Homolog of  Ceres CLONE ID no. 316638 at SEQ ID NO. 98 with e-value of 1.99E-24 and BLAST sequence identity of 68.0
MGLTFTKLFSRLFAKKEMRILMVGLDAAGKTTILYKLKLGEIVTTIPTIGFNVETVEYKNISFTVWDVGGQDKIRPLWRHYFQNTQG

SEQ ID NO: 103 - DNA, 1094 bp, Arabidopsis thaliana
  misc_feature (1)..(96): Ceres CLONE ID no. 13930
  misc_feature (1)..(1094): Ceres CDNA ID no. 23369276
  misc_feature (1)..(1094): Ceres SEED LINE: ME06485
  CDS (32)..(1009): Encodes the peptide sequence given in SEQ ID NO. 104
atcgccggcgttagggttgtttttctcaacaatggtgtctctggccaagtttcactactgtgatcaaacactccacctccgactcgacactcaccgtaaaccgcagcctaaacctgtttcataccgaatcttacataaacctcctccttctcgcgtcatcagagcttcttcgttttcatcaaaccctaaaccctctttcctcaaaaccacctgcgtgaccttaacaacagccgccgctttactctccgcttccctccacctctccaccaaacccgtcaccgcagcaactctcgtctcacctcctcctccaccatccacggcggcggatctcacttccgatcaaatctcgtcgcgtccaaaggaagaagaagaagaagcagcgctggagaagcacctcactaagaatccaaacgacgtcgaagctcttcaatcactgatgaaaatcaaattccaaaccaaaaacatcgaccacgccttagagattctaaaccgtttgatcgaaatccaacccgaagaacaagaatggcggatcctaaaagctcaggtacaaacctacggcggcgatttcgattcagcgacgaaaggattcgaagaggttctatctaaagatccatttcgtgtagaagcttatcacggattagtaatggcttactccgaatccgaatcgaaattatcagagatcgagagtagaatcaacgaagcgattgagaaatgcaagaaggagaacaagaaagattttagagatttcatgttgttgattgctcagattagggttatcaaaggtaatccaattgaagcacttagggtttatcaagagttggtgaaagatgagcctaaagactttagaccatatctatgtcaaggtttgatttatacattgatgaagaagaaagatgaagcagagaagcaatttgcagagtttagaagattggttcctgagaatcatccttacaaagagtatttagatgctaatgtactcaatactaacaagcttttcgctaagaatcagtgaaaatttgtgtttttgtttgaatatgcttagaaatgtgactttgaacttttatttgtgatcactgcgaaattattctactacc

SEQ ID NO: 104 - protein, 326 aa, Arabidopsis thaliana
  misc_feature (1)..(96): Ceres CLONE ID no. 13930
  misc_feature (1)..(326): Ceres CDNA ID no. 23369276
  misc_feature (1)..(326): Ceres SEED LINE: ME06485
  misc_feature (271)..(304): Pfam Name: TPR_2 Pfam Description: Tetratricopeptide repeat
  misc_feature: Score of 880.6 for HMM of FIGURE 3
MVSLAKFHYCDQTLHLRLDTHRKPQPKPVSYRILHKPPPSRVIRASSFSSNPKPSFLKTTCVTLTTAAALLSASLHLSTKPVTAATLVSPPPPPSTAADLTSDQISSRPKEEEEEAALEKHLTKNPNDVEALQSLMKIKFQTKNIDHALEILNRLIEIQPEEQEWRILKAQVQTYGGDFDSATKGFEEVLSKDPFRVEAYHGLVMAYSESESKLSEIESRINEAIEKCKKENKKDFRDFMLLIAQIRVIKGNPIEALRVYQELVKDEPKDFRPYLCQGLIYTLMKKKDEAEKQFAEFRRLVPENHPYKEYLDANVLNTNKLFAKNQ

SEQ ID NO: 105 - DNA, 990 bp, Populus balsamifera subsp. trichocarpa
  misc_feature (1)..(990): Ceres ANNOT ID no. 1455046
  CDS (1)..(990): Encodes the peptide sequence given in SEQ ID NO. 106
atggagtccattgctaaacaaccccttaatctctctctcaatccccaccgtccatcatttccaaaccccatcgtttccctcaccttcaaaaccccacctccctcgtcatcacccttcaaactctccacctctatcagagcctcatcctcctcccgcatcaccccactcaatcaatctctcaccaccatcatcaaaacgacttccatcactctcaccgccgctgccgtattattcttcacgcgcttcaactccaaacccgcaatcgcctctccggtcgccgcgtcgtcatccactgcagaccccacaaaagaatcgtccaaagaaaatgtttcgtttgaagaacaagaaagagctcttcaagatcatctggctcaaaaccccagtgatgtcgaagctttacggtctctcatggaggtgaggatcaaatcaaagaaacttcaagaggcaattgaagttgttgaccgattaatcgagctggaaccaaatgaagatgaatggccattgttgaaatcgcaaatttatacttacagtggagattttgagtctgctaaagatgggtttgaagcagttttgcaaaaagacccacttcgggtcgaggcttatcatggccttgtaatggcgaattcggaatccggtggttcgttggaagttgtgttgaaaagaattgagagtgcaatgaataaatgtaagaaagaaaagaagaactcggatttgagggattttaagttattgattgcgcaagttagagtaatggaggagaagtattttgatgcgttgaaggtttatgaggagttggtgaaagaggaaccgagggattttaggccgtatttgtgtcaagggatgatttatactttattgaggaagaaagatgaagcagaaaagaagtttgagcagtttaaaaagcttgttccgaagaatcatccttatagggagtatttggttgaaaatatgtttgctactaacttcttttcggagaaggtagagagatag

SEQ ID NO: 106 - protein, 329 aa, Populus balsamifera subsp. trichocarpa
  misc_feature (1)..(329): Ceres ANNOT ID no. 1455046
  misc_feature (130)..(163): Pfam Name: TPR_2 Pfam Description: Tetratricopeptide repeat
  misc_feature: Score of 814.6 for HMM of FIGURE 3
  misc_feature (1)..(329): Functional Homolog of  Ceres CLONE ID no. 13930 at SEQ ID NO. 104 with e-value of 9.19E-77 and BLAST sequence identity of 54.7
MESIAKQPLNLSLNPHRPSFPNPIVSLTFKTPPPSSSPFKLSTSIRASSSSRITPLNQSLTTIIKTTSITLTAAAVLFFTRFNSKPAIASPVAASSSTADPTKESSKENVSFEEQERALQDHLAQNPSDVEALRSLMEVRIKSKKLQEAIEVVDRLIELEPNEDEWPLLKSQIYTYSGDFESAKDGFEAVLQKDPLRVEAYHGLVMANSESGGSLEVVLKRIESAMNKCKKEKKNSDLRDFKLLIAQVRVMEEKYFDALKVYEELVKEEPRDFRPYLCQGMIYTLLRKKDEAEKKFEQFKKLVPKNHPYREYLVENMFATNFFSEKVER

SEQ ID NO: 107 - DNA, 1023 bp, Populus balsamifera subsp. trichocarpa
  misc_feature (1)..(1023): Ceres ANNOT ID no. 1475265
  CDS (1)..(1023): Encodes the peptide sequence given in SEQ ID NO. 108
atggagtcagttgctaaactgcactgccgtcaccaacccttcaacctctcactcaatccccaccgtccatcatttccaaaacccatcatttccctctccttcaaaaccccacctccctcatcatcgtcacccttcaaactctcctctacctccatcagagcctcctcctcctcctcctcccgcatcaccccactcaataaaaaccttggcaccatcatcaaaatcacttcaatcactctcaccgcggcagccgctttattcttcactcgcctcaatatcaaaccagcaatcgcctccccgcttaccgcgtcatccacagtagaccccacagaggaatcttcgaaagaaaatgtttcgtatgaagaacaagagagagctcttcaagattatctgtctcaaaaccccaatgatattgaagctctacggtctctcatggaggtgaggatcaaatcaaagaaacttgttgaagcaattgaagttgttgatcgattaatcgagctggagccaaatgaagatgaatggccattgttgaaatcacaaatttacacttacagtggagattttgagtctgctaaagatgggtttgaagcgattttaaaaaaagatccacttcgcgtggaggcttatcacggccttgtaatggcgaattcggaatccggtggttccttggaagttgtgttgaaaagaatagagagtgcaatggataaatgtaaaaaagaaaagaagacttcggatttgcgggattttaagttgttggttgcgcaagttagagtaatggaggagaagtatcttgatgcattgaaggtttatgaggagttggtgaaagaggaaccgagggattttaggccgtatttgtgtcaagggatcatttatactttgttaaggaagaaagatgaagcggagaaaaagtttgagcagtttaaaaagcttgttccgaagaatcatccttatagggagtatttggttgataatatgtttgctactaagttcttttcggacaaggtagagagggagaggagttga

SEQ ID NO: 108 - protein, 340 aa, Populus balsamifera subsp. trichocarpa
  misc_feature (1)..(340): Ceres ANNOT ID no. 1475265
  misc_feature (138)..(171): Pfam Name: TPR_2 Pfam Description: Tetratricopeptide repeat
  misc_feature: Score of 939.8 for HMM of FIGURE 3
  misc_feature (1)..(340): Functional Homolog of  Ceres CLONE ID no. 13930 at SEQ ID NO. 104 with e-value of 3.50E-77 and BLAST sequence identity of 52.6
MESVAKLHCRHQPFNLSLNPHRPSFPKPIISLSFKTPPPSSSSPFKLSSTSIRASSSSSSRITPLNKNLGTIIKITSITLTAAAALFFTRLNIKPAIASPLTASSTVDPTEESSKENVSYEEQERALQDYLSQNPNDIEALRSLMEVRIKSKKLVEAIEVVDRLIELEPNEDEWPLLKSQIYTYSGDFESAKDGFEAILKKDPLRVEAYHGLVMANSESGGSLEVVLKRIESAMDKCKKEKKTSDLRDFKLLVAQVRVMEEKYLDALKVYEELVKEEPRDFRPYLCQGIIYTLLRKKDEAEKKFEQFKKLVPKNHPYREYLVDNMFATKFFSDKVERERS

SEQ ID NO: 109 - DNA, 596 bp, Arabidopsis thaliana
  misc_feature (1)..(596): Ceres CLONE ID no. 641355
  misc_feature (1)..(596): Ceres SEED LINE: ME05058
  CDS (38)..(451): Encodes the peptide sequence given in SEQ ID NO. 110
agaacatcctaatcgaaaaaattaattaaggcacacaatggaagaggagtcaaaggagaaaaagaaggacactaaggaggaaccacgttatagaggagtgcggcggcggccgtgggggaagttcgcggccgagattcgggacccggcccggcacggtgcccgagtgtggctggggacatttctcacggcggaggaggctgctagggcttatgaccgagctgcctatgagatgaggggcgctttagccgttctcaattttccaaatgagtatccttcatgctcttctatgaactcatcttcaacattagcaccttcatcttcttcttcaaattcaatgcttaaaagtgatcatggtaaacaagttattgagttcgagtgcttggatgacaaattgttagaggaccttcttgattgtgatgactatgcctacgagaaagacttgcctaagaactgaacggtttgatcaaatttgaatgttagattgatttcaaagcatacctatagtagggtgaatgtcttcatatatgatatgatttccttttaggcagcactttactttggtgagtatggtttataacttaagaatgactttgttg

SEQ ID NO: 110 - protein, 138 aa, Arabidopsis thaliana
  misc_feature (1)..(138): Ceres CLONE ID no. 641355
  misc_feature (1)..(138): Ceres SEED LINE: ME05058
  misc_feature: Score of 289.4 for HMM of FIGURE 7
  misc_feature (16)..(68): Pfam Name: AP2 Pfam Description: AP2 domain
MEEESKEKKKDTKEEPRYRGVRRRPWGKFAAEIRDPARHGARVWLGTFLTAEEAARAYDRAAYEMRGALAVLNFPNEYPSCSSMNSSSTLAPSSSSSNSMLKSDHGKQVIEFECLDDKLLEDLLDCDDYAYEKDLPKN

SEQ ID NO: 111 - DNA, 1836 bp, Oryza_sativa
  misc_feature (1)..(1836): Ceres Promoter p530c10
gcctctcgaccacgagtttagcacttgtgcaacatatatgcgtgcgatgaacatctactgatgcgccatgcgaattttagcgttcgttcatgacgcttccaacggcacagaggctgagcagcagcatgcatgcatggctcttgtgaaaacaaaaaaggttactggtaaatgacatgctgctgtagctagctagcagaatgcaaggcccatgcatatgcaatgctatgcgacaagtacagtaccagcatgtatggtagccagctaactaatctatcagcagaggcagcaagctcgtgcatggtgtgatgcacttctctccagtaatctagtggtaattttcacccaaagcgttgctcatatggacagtaattagtaatattaccaaggttcacaatcccgttacctgaccaaatactactcacgaatggtatctctggttttcgttaaaaccgttggtaaaccagcaaaaatagacaaaatttgtcaaaattttaaattttagttttttttttttaacttagccgggaaaccttgaagtttgtgctgtcgagctgtcctgggaaggacggttttggttgggattgtgaaccctggttactgcacttcatttttgaacagatattagtgcaacagacaaatgccaacgcatttttttctgtttaccggcaagctgaagcttttacgatccccatacagccgttgctgcaaacctgccaagaaagagcagcagaaacaggtgtcattttgtggtggaaagccaagtaaagtaaacagaagatggaagatagtgaggaccagggagtgaggcaggggacacatggcccacgcctccctgcacattttcgtgtataaatacaggtggatgcatcgctctcccagcatccatcggttctctgctctgttcatccatagagtttcctcctcttctcctttagtgcaaggtagagaagagcatgtgtgtgtgtgtgtgtgtgtgaactgtgaagtgcagagtgcttctgtagttctgtgttatgtccatagtgatcttgttaggattgttgctatggatgcatgatgttatggttgatctctgaattacagtagggacttttctgagatctctggattagtggggggtgctaaatttttttctggttgcatcagcttgggtttctggtattggtgtgggttcttgctctgaattttggttcagaatgtcgatttgtttgtgtttgttctctgaagttgagagtagctatgatccatccagcacagaactgcaggtcctgcctgccggctgcatatacaggacatgccattttgcaagctctgggcttatggtttctcttttggagttcttcttcttgcatgatctgtgttctctaacaaaggaagcaagatttagcaactttattcagagacaagaaaaggatctggcaaccttttgtttctgttttatcctactcgtaaagattgttatttaagcaaaaatttcccaaaagttttaaatataatttccatgatgtgccactctcatgtccttgaacctggcactcattatgggctcctcagaagtgctgtagctaatgtcactaatcttttgtatctttgttcatagtcttgtattttatgatgcttatccctttgtgctttccatgtttgatgtccaaatgtcatggcaatgtttttgacttctagtaggggttttagtacctttttgttagataagtacatccaaattctgtttatttattcaaaaatcattctgtttattcactgaaaacatttgtccattcaatggactcataaactgtctgtgtttttcaggcttgaggatccatctagaagatagca

SEQ ID NO: 112 - DNA, 3000 bp, Oryza_sativa
  misc_feature (1)..(3000): Ceres Promoter pOsFIE2-2
gcttaacacatgaactaccaaaatatactgatcactttgttctagtcatacataccttaagtcattttattctgcagtgtttggattggagggagcattctagcatcccttgggtcgttccagcaaatgtggttctccaaagcagagtaagcacaacacagtattttaggttatgtttcccctatctcgtcacggacagctcacaagttaatgtgatttatctcactatagatacgaagaacatggagtatcctacatccaaaggaagtgcccatgaagttgtggagcatcgctacgatttgtgaccaaatttgggtgcatgtgggcaatcgtattacagccaccctgttgttgatctatatcgactattatccgacgatatttatcattatattatgactagttagtttgtagattttgagagggcaacataagaagcaatccagcttaacctgttatgttcttgatggtagattctagttcatgtgttgaatctgttctccctgctgtagaatgtatcgagttgctgctctctactctgtacttttagaataccttttcaatcatttggagtcagctgattgttgtactacttatacgccacctgattagtcatgtcaacaattaaacttgagcactggttaagttaagagtggcctgattgtagttgataatcacattttattcgtagacattgtatgctggatctttatcagccaccgtcagatcatcctctgtaataaatcttcatcagacgtgtgtgccaatcgcaaggaacacgaaatgcatccgaaatgttactctgagttaatcaatactataattcttggtcaaattaattatttatatctataaagtttaaattaaatttaggaaaatgaattcatgcaaatcttgtggtaagttgtcaatttcataaaaaatccagcttactactccctttttaggagtgtgttgtggctgcacacttctgccttttgatatatacggttctattctcggtgtactcctttattattattaaaacaatcccagttacttggtaagtgctaatcacgaatcaaagtcaacataacaaatcatgtgcgtacagctataactcgattacacaaacaacaaaattcatatttgaacataaatccagttgtagcatatctggtagtataaagttttttttttgtatagaagagttttaatttctgtaagttttggaaagcatttaatcctagaaattgtagtgtagctcaactaaaaaataaatgaacttgaatcgaaattgggttgtatcataaatctttaccactcaaacgaatatttatcctaaaccacaaatgactcttttcatcaaggaatgttttgttttcagcattttaaaaaaaaacttttctaatatggttttcatgtttcgttcttttgaaatttaacatctatttaatttgcacggctccataaattcaacggatacatattctgaataattactaaggaggcatatatcggctctcttaatacaaccgcttgtttctcaaaatttattttgagttttgtctacacattctcaaggacggtacaaacacactatagatgttcacaattttttttttctaaagttgattgatggacaaatgtttgaacatataaacatataagcactgaatatttgcttatgcaggaggtatttatatcaagttcgatactttactaccatagtccctaggacactaaaatgccttcaatgatctgatgaagcctaagagagaatattgatcagtggagcgacttgcaactacacatggcacaagtagactagacacggtatatattcatattaacttgttaaaattttactacttaacagttcacttgtggtgcatccatatcaattcttacttacacaatatttgtaaaaacaacctaacactataggatgacctagacaacctttatgtcaatcacacttagaagatgatcgtctttttaataaataatgtgtactacacaccatgctctccatatagatcaagatctacaaacccttccacttataaaccttaccaccaaaaactcattaagttgcttcatttatctatgctattaagaaaaaaacttatttcgtttatgccatttctagaaatggctagtcacactattcacaatattatataataaataaaagtttcaaatattcatccaccaaaaatcatcaagtcgtgggacttatatgttaattagagaagtccctttgggtgcaatcgattttggaaaccctaaattttttctatacatagaagagagagatgtctagttgcaattgcttttgcgatgtgccaaccacccttctagctttcatccacgtctacttaattgccattcttcttcttctttttcttcactattactacctcctatcttagcgaatcttcttcttcttcactattactacctcccaccttagtgaattcatcctcattgttcacaatgacattgctaagttaactaggtatgctaagtacacaattagaatataacctagagcctttgtttccatcatacttaaaagatgacatttttatatagataaagtgtgctactcacaaggcttactatatatatgtatgatacacacaaactccacaacccaaaactctttcaagttgtgtggcccatctatgctattaaaaagcccatttagcccatccaacatgagaaaccctagggttttttccctataaaagatacctaggttattgttgcttttccaccccgcccgccgccgctccctattcctatttaatcccatctctcttcctcatcaccgctctcctctctccaggcaagaggtacgcactttttgtttcggatttgaaatctttgcttcgttttactatcattggtcataagttcttttttgaagatgtttgagaataagtttatcattgagattatcgtcacttgtgataggaagtacgcaacctcaagccggacaagacgtgagcaaag

SEQ ID NO: 113 - DNA, 2023 bp, Oryza_sativa
  misc_feature (1)..(2023): Ceres Promoter pOsMEA
gagagcagaacatagtagccgctgttttctgggggtgcaatttgtgcaagatcgctatccttatggaccatgcaagcaccaagcaatattaagccaggtccaacagcggtcttggggaattcagaaatgagcttaaaaacctccttgagctggccagctcagccaaggaggtccatcatgcatgtgcatgctcaatacttggaattattgcaaaatgatcggtcattgactggaagactttgcgcccttcctcagccaaccttatgtggctgcatgcatagagtaccaacaggaaggtagcgtttgttggaataaggtttgcatccagcatgtccttgtagagcttcaaagcctcagcaccttggcccatgaaggccatatccagctaattgcattccatgagaccacattcttgctatccatactgttgaagtgaagatgctccgagcttcggaaatgcttccacactatgcatacatgtcaatgagcactgtcatgacataaacattgggccccaagtcctcctcagcgataatcctatgcagccactttcccagggacaaagctccaagctgtgcacacgctgaaagagagctagaaatgatgattggatttggtcacacgctaagtaccagcatttgctcaaagagggcaattgccatctccgtccagccattctaggcataccctggtattattgctttccatgattccgattccgtggtcttctatggcatcgcattgaaggccttccttgcagactccatatcatttaacctacagtacaatatggtaattgctgtcgacactggagaattcgcagtaaatccagacttgagaggaccatgtaagcattgatcaagcagttcattcccaaacagactatacgggatcagtgccagtgctcgagtttggcttcaattccaaggccatcaacccaataaacagattaactgatgaaccaaccatgcaattcgccgagcaaacatagattaagcattgtaggcaaccaaatctggattctccatcaagtcaaagagacgccatgcagaattccacatccccgctgtatacaccgagatcaaccggtcagaacatgctcatactccgccaaccctctcttcagaacatgctcatactccgccaaccctctcttctctgcaagaggcatcctccccaattccccattgttatatctgttgctggtaagaccgttgccagcgtggttgtgtcagaccgaacagactctgcactcgccatcctcacgaacgactccagggcctccgaaccaggaagcccggccggccatcagcgtgttccacataacggtatccggcgactgcacagtgtcgaacaccttgcgtgcgtggtcacctctggacagcatgaagcgtacaggctacagcttggccaatgcggacgccacgaacgtgtcggcggcgtaacccgcgcgtgcagcgcgccgcgcgcgggctgcggagtcggttggagacgacacgccgccgccatgagagcaatgagcgaggtggcggcgaaggcgaaggagaagtagtcgaggcaagcggaagagaaggcggcagcggagaaagcgatcggggcggcggaggaggtgggtgggagggagggacgcgtagcggaggtcggaggaggagggagctgaggtttccggggcgggggtcgagagggtagtgtacggaggcgagggacacggcgaggatctggtcgaggtagcgcagtgtgaaggaaagcgcgatgaggcggagggcgccggcgaagagcggcgcggcggatagcgggaggaggcggcgccggcggggtctcatccgattggaaacagattgggaagggggagggggtaggaatacgtggcgtcggcagtattaggtagagagagaaaccctttccatcctttgtctcttagccccgaaggagagagaaaaatcagaaaaaaaaaaccctccgcgtgtgggggaagcagagctccggacgctggcgccgctcgcgccaccgcacccgcaccgcc

SEQ ID NO: 114 - DNA, 2034 bp, Oryza_sativa
  misc_feature (1)..(2034): Ceres Promoter pOsYp102
gaacgacccaaacgcgtaaatggtggtactggtttccctgctttgccgagtaccagcagccacgaagaacgttacacaatcgagtacaaaatctataagagcaagtttaatagcatagccaaatactacctctaaatcatctatagccaatttaatagttcatttattcaataattacttataaacatatactacaatcattaatatatggtcttacttcttatacacataatattttggagtccgtgttacagctggctataaatataagggattttggttggatgtggtacatcctattataatgaatctagacatgaaacctgtccaaattcatcgtgctaggatacgccacatctaaccaaaatctcttatctttagggatggagagagtaataattaaatgaagctaggtagagtttcccggtcaatacgcttgcgtgtgcttataagagcatggccaacagtttcccgatactcttcccaatatcagttttgaggagttttgttggaaaaaatcgctccaacagtagacctaaatcacccctaaaagcttggcgtttccaaacccgcatatttcgttctccacttgtagggaagagactcggcgcccaatccttcaaccgcatgcacttcgcgcgcgctgtgtgaaaattttcctaccaggttcttctttgtgcgttcgtctacctgtgagtcaatccatcacgccagcagcctcatcttccccgcagctgtctgggaaagcagccatggctcccccaagcttccccagcgtcgacatttttttctcagcggcagcgccagacccatctccaacccaattgggcggaccttcgtcggcgctcccccagcaccaccaccgactcgaatcggccgtcgcccctattcatctccaatcgtccctcgaccctaccgcatcctgcagcacagcctgtctctcgcgtcagactggcgctgcgctccccccggtaatgtgcaggcgacaaaggccccatgcgatgcgaccagcagccggcgacaaccggaggtgcccagtcgctggccttcatcgaatcatcgtgcacctcggtcggagtcgatttctgattgttgctgctgctcaaatctggagcttgctattgctgagaactgcttggtggtggtactggaaatttgttgtttgctggctgatgaaaactgttgttctttgctgctaaaaactgctgcttgctagtactgaaaagtactattgcagctgctgaaatatcttgctgcttgctgctgaaaacttcaagttgttaacaccgttcacactaaaaaagctgaaattttttttctgggctgaaaaccccattgttgatgattgcagaaccaatatttttccatgtaaaatacaggagatcgtggtaataatcaagtgaaatatcattttggggcaaatactcagatcgtacctgaagccaatggaaacattgttcaatgcttaaactgtcagttatgatgtcaaagagattgatcactgaatgtcctgaaaggagccgtgaggaggatgcagcattgcagcgtgcgcgagcgtgagtggaggagaggaatgacgattctgttggtagttgtcgatgtggcctactttttttgttttgaggattaaattttgggaatctcttggagataaaaggtattctcataccttaaatcctttttagagatctaaaaaaaatgatttaggggattgaattttgggtggctgttggtgatgctctaagttgcacatcctggggaaaaacctccctaatccatcagcaaaccgatcaaccacccacgacaagtcgacgccaccgttttttttttctccctcctaagtcctaaccccacaaaaatcccgcgaactttcgtctcaccacgcgccgcgtgccccctacaaataccaaacaacacccaccacgtccactcacaaaccacgcaggaaacctcagaaaatcaccgtacgcgacgcgggcccaagaaaaccccgacagaaaccgcgcagcagcaacaccaccaccggcgtcggag

SEQ ID NO: 115 - DNA, 1877 bp, Oryza_sativa
  misc_feature (1)..(1877): Ceres Promoter pOsYp285
ggcccgagttaaacgatcttccacgtgtcagcgaatcctagtcgttcgatgaatctgaatctgacttgtggtggttggacggccacgtgttaaaaaagggaaacgtccgcatcacccgatgctgggacatttgcaatttcgatccagctgtagattgaccagttgttactctcttttttttaacaccatacaaacgtaatactccctctgtcccaaaatataagtattttttttaacctcggttcagtcttcgaggtgctactttgaccaataatatttataaaaataagatgttttaaataaagagagttgcatattatgatagctcgtttaatgataaacaaagtaccatcaaatttacatgattaatctttttaatttatttgctattaatagttaaaatttaaaaagtttgacttcacactgttctaaaaatacttatattttgggacggagggagtacacattagagcaggtacaatagcagactagtagccagctataaacatattttaatgagataaaagatgagagagaacagcgggctacagatctgtagccagctgcagcacggactccaagacattgtgtgtgtatgacaggtgggaccatatattaatagtacagtaagtaactattgtatgaattggctattagattagctataggtgaattgtagctagtagtgggctatactattgaacttactcttatatctctcaatatctccagaaaactaggacgatatatattgatattaacaaagtcatcatagatatctcgctatcgacatatatattacctatcactgaaaaaataattaatcataaatgcaagcacatatactacgttcaacactgaatgtaggtagattggtagacgggttccaccgcaagaaaagcattgcaccagtgaagaaagaaacatcggaatttgtatgtagtttgttgtttgatgaattcttttgattaaaaaaaactaaaatcagagttgattcagttaatggtgttgcctacgatatacttccatatcatgatatcactgtagactatgaatcatatctttaattaaaactaaatcaagaaattaagtatgagacctcaactcaatgaagaatttctagttgaaaaacattcctagtgtgcgttcggatggaggtagggatcttctctccgttcatataaaaccggatggttcattagaacatgattaattaagcaacagttaatctaaaaataaattaatattttttaagaaatttttgtatagagatcttttgaaaaaaatacattggttagaaagcatactaataaaaagagaaaaataagaacatagtactatagtagaaaatgagaacttggagtatttgagaggatgggaaataagaagattaagaagatgcgtaaagtgaacggttaacgcatgattgattaattaaatattaattattttaaatttggaaaataaattagtatgatttttaagcaacatatatatatatatatatatatatatagaaaaacatagttttagaaaatataagcgtgtaaaacgatatgcaggaacgaaacgttgagcattcaaaatttcaaattgaacatatgaatcaagagagaataaaaaaagaggccttctaggctggcatggacaattggacatgttttcaactagggtttcaagcttcgagcatccacttttgtccttgcaaactttatacggcaaggcccgtgaatctagccccccacaccaccccacccgcccgcgccgcgcggccgcctcgcctcccctcccttctcctcctctccgcccccgccgccaggccgtccacctccgccgtctcctcccccattcgcacccaaggcgctggcgcggaaggc

SEQ ID NO: 116 - DNA, 1000 bp, Arabidopsis thaliana
  misc_feature (1)..(1000): Ceres Promoter PT0565
caccaaatatagtgttatttcaatactaaaatggtgttatggttggagatgccctaaagataaacatgacgagacacgagatttattaatttcttgatcaaccataacttaataacttaatattaatttcacttaataatttccaattaagtgaatctttacttcaccaaaagttcctaacgaactcttattttctagcatcaatattaccatgaactagcatcaatactatcatgaaaaattcctacttcctatccaactcttaataacaatgctagtcttaacaatattcatcaaaaacttgatatagaccttctaacttagccacgactagtatcggtgaataccaaaattaatgtattcatgagaacttgagatttctctaatgtattcttgttactaaacaagtaacaacactcaagaaatatcatgatcaaatattttactcataaactccatatttcacattttgaaaattttaaacagcaaatcacattgaattttcgtggtaaaagtatttaaaattgaaaaatagcagctcctgatttcaatgtataaatttatctttatatggtttatgtctccaacttattttaaaaaagagagaaagagcacccaaaaggtgaccgtttgaaattcgaatttatttccgtttgaaattcgaattcaaaaaaagtaaaccgaaccgagtctcgttactgactgtcacacattgtttccctaaaagctaattaacccatacgtggcgtaatataacaggtcagtgatcaatactaaataacagacatacacctttaaaattcgtgcacgctccaaaacaaaatctacacttcaaaatcaacggtcacgatcattcctcaaatttcaaaaaattatttaacctcacttccttcgctttgtttttaaaacctctctctctttctctttctctttcgccattaaaactctgtttcctttttcagagattctcagagaagattcattttaccctaagaaaaaa

SEQ ID NO: 117 - DNA, 999 bp, Arabidopsis thaliana
  misc_feature (1)..(999): Ceres Promoter YP0015
ttgagccttattgttgttattgacttttagccaatagaaagagatggaaattcaataattatccacaaaattccaaatcattggtgtacaaaaagatctaaggctgttatattttcaaaaaagaaagaaaagaaatgcaacaaatatggattaaactgtggtttgtaaattgagctttgcatgaaaactttatcactatgatttcactactccatatttattgactaaagtggcactaatgaatttcttaatcatgaaatcttgtatcaaaaagtactaaaataaacatgacattggcaattaggaaaattctaaattagaaattagtaaaaatgaaaggtgaaagggaaagatgatgatatgaattggttggtgaccaggagaaatgtatcccgatttttgcagacactttcagtgtccccattcatataattatggcccacctcgttaagatttttcattcaccaccataacaagatctaagcttagatttcatgtaattaaacatataatatacttgccaatactatctaataaagtatacttaagcaaaaattattactctagtgtaaggcgatgaaatataagtttagttgaaaatttatgtcgatataacaaagtataatgaattaagaccttggttttcgattaacaaactaattaaacactagttttgcctaataaaaccgggaatcgtattcaaaaccgaacgacaaaacaagggacaagttgagagacaaaaccaaatcagcatctttcttccagaaatgtcatgaccacatgacgtcatcttgacccttcttcattgtgatatctgtggataaagcgcacgtgtttaattcacgaaccttcgtagtaacgaaaaatccacaactttcatattttttaattacccactaaactaaaacaaatttggaaaaacatgaaaaactttttctttttttccaggttcgtgaacctcgtaccctctatataaacctcttaaccaccttccacata

SEQ ID NO: 118 - DNA, 999 bp, Arabidopsis thaliana
  misc_feature (1)..(999): Ceres Promoter YP0087
tgaattgagtaaaatgtgttttcaaacagttaggtggtagaaggtaaaggtaataacatcatgatcttactaaaagaattgttgcatactaactatcaatattctcaacaacataatataatgtttttttaggtaattttccattttaattttttgtgattaaacaattaaacaactcgaatgatgatgataaaaaaaaaaaattaacaactcgaataagttaaagtagcaatacacatgtcgttcaattcaaccaataaagtaagacttatatttttaagaagttgactaatagcttaataagttggaaaacttgtgtagtttcttaattcccacgtgcagtaagaaataaaaatgaaaaaaattattatatccttcccactctgcgacttttcttttattttatcaaatattaaaaagattcatatcacagtttacacattgaaatcataaacgataattatgtattttgtaataaaaagttagttctgaagctcatactttggatagtcgctagtcgctaatatgctccttgtaataattaaagtcactacgacgcacgtcaaagccgatatttagggcttaattgatgcgtgtttttcttttcatataatagtaatataaattagtactaataaagtatgatggatggttgagacagaaaagaaaaaagatgactgtatggtcatcattacaaagaagaatgtattcttcatgttcttaagaataataaaatgtcacttgtaaatcaagttggtaagcattttgagaactttgttcgatgcaacgtatgatgatttatgtagacaaaagataaaaccgtatcttcaactattgccaagaaaagataaaacctaatctagtcagtctctcaacataaatacaacccaatagccaaactgtgtccaattcggagagaaactaaactaaaacaaaacacaaaagcccaacataagcccaataaaacccattttataaacagaacattactaacactca

SEQ ID NO: 119 - DNA, 1000 bp, Arabidopsis thaliana
  misc_feature (1)..(1000): Ceres Promoter YP0093
atgatgaacattctacatatataattattatgtttaagcacttagacagcataaattctttctaattatataaatctaaccttgttacattgtacatctataaattacttgaagaaataacgagttctatttctttttaaaaattaaaaatactataccatatctcagtgattaagttgaaccaaaaggtacggaggagaaacaagcatttgattcttccttattttattttattcatctctcactaatgatggtggagaaaaaaagaaaatacctaacaaacaaatatatattgtcatacaaaaatatttctatatttttagttaattagtttatattcctcacttttcagggcttatataagaaagtgagcaaacacaaatcaaaatgcagcagcaaatactatcatcacccatctccttagttctattttataattcctcttctttttgttcatagctttgtaattatagtcttatttctctttaaggctcaataagaggaggtactattactacacttctctctacttttacttgtattttagcattaaaatcctaaaatccgttttaaattcaaaaataaacttagagatgtttaatctcgattcggtttttcggctttaggagaataattatatgaaattagtatggatatctttactagtttccattcaaatgattctgatttcaatctaatactctcactctttaattaaactatatgtagtgtaatttcacactgttaaatttctaccatgtcatgtatattagagttgcatagaaaattgtaaaacatccatttgaattcgaatgaaacaaaatgttttaaaataaaattttggtttttaaaagaaaaatctaaaactgaattatatcgtttaaccaagttgtaaaagtcataaaacgtagtatcttgtaaatcgctcttccacggtccaaatagacttctagtaataaacaagtaaaactaattttggtttcttactaattttcacaga

SEQ ID NO: 120 - DNA, 999 bp, Arabidopsis thaliana
  misc_feature (1)..(999): Ceres Promoter YP0108
ttagctgaaccaggaaattgatctcttataccagtttccgggtttagattggtttgatggcgatttgattaaacccccgaaattttatgtcgtagttgtgcatagtattattattctttgcggacaatagacgtatcgggaccaagttctgtagcaaaattgtataagcttaagtttgatgaaatttaaaggtaatcactaaaacccaaatgggacaataaaccggtgaagatttagagtttttaattttgactcatgaatctggagaaagagccctcgttaaaaggagtgaatcaatccataggggaaaaagttttgtctttttaaaaactaaagaaccaaaccttaatagaagcagctcaatgtgtgacaactttccactggcactaagataaagtgactagcgatgagtgcaattattgaaatagtagatggtaaatattacatacaagagtaaaaatatctttatgtcaatgcttaattcagtgtttctggttaacaagagaaacttctctaactttcgtaattgggtcttataaaattttatgcaattatgattttacccttttactacttttcattagctttcacgaatctattttgacaagagaaatcattagaggtaaacatgctttttggtcaagggccttaacagttccaccaatcaagctcaaaagttgtacttaaccgacatcttctgtgaaaacatataattacatgtacaaatcaaaactaccttatgaaataaatagaaatattgcagttcatttctaatttaacctcttcaacttttaaaactatttacatttctttatgtcatttctagtcattttgatgcaaattgtaccatttatggattatcttcacaaatttttaagttggtgaaaactttttggtgggtagttaaaacttgaaatagaaatttactttaccaaaataaactaatgaaaagtaatcactccactccctataataagatttccaacgttcccactaagc

SEQ ID NO: 121 - DNA, 999 bp, Arabidopsis thaliana
  misc_feature (1)..(999): Ceres Promoter YP0022
tagttccattacaatttccaaatgatttgttacaaagctacaagattattcgaaataggatttcatccataagagagaatggtgtggtcgacgctacaatgttgatttattggttgtggtttgcatcttggggatgtcaaatcctaagtttcaagttcttgtaaaaacgttttcaggtttctttaatatattttaatattaatgtaaaaagaaaagatatagcttttgtacaaaaaaatttgtttaatcactatgtaggaggatgcgatcaaattcatggaatgatgtattattagcttttctatcctcactctaaaaacaatactatagtgagttaaataatttgatcatttcaatgtagattaaaattttattaaaagaagaaaaatttaaaagcctataacaaaataaaaaaggaggctcgaggtatgatgggtgtagcagaagagctggcaacagctatcgactgagtgattacgaactcagtactcagtgttctcagctcacacactctttttttgttctctttcttttggacagctttcattttctcttttcttttttctattttgtttcaaaattccatccatattaaaataggcctgatcatgagaataaaggaaatactaatgatgagtttctcaataatgcaataagatgcaattattatgagctatttactattgaaaatgagcaaataaatgtcaaaacacaatctggttaagttagagcaactccattgtataggattcatgtagtttctaagaaaacaaaatgtattaatattttacttttacatccaaaaaaccaacttatatgagtaatagaaacgatcctaatattaggaattttagagattttctctcatctgtttcttaacttttcaatatttttattttttaaaattgtatgagtttctactaagaaactactgctggagttggtcttagcttcccaatgcttctccacctatatatatgcatatctccttcttaaaac

SEQ ID NO: 122 - DNA, 999 bp, Arabidopsis thaliana
  misc_feature (1)..(999): Ceres Promoter YP0080
aagcggcaatttagtaagaagtactcaaagtatcatttaccaaaagtatatggttttgggaagagttgttagggatgtattctttctaaacagatgatatgacgatgttcttgaaaactaatgttaaagacggaatctctggcatcttcactcgggagatatattaaaccgttgattgtagttagccatgtacttagcttagtgcacaaataatctgctgcaagaaatctttttctattataatatctctcatttaaacattagaacatattgtttaacttgttcttctagaaataaaactgctaatttcttatggtaaactattttcctttagattgcacaatcgaactcgaaaatctagtggagactatgtgactatgtttatatatatgaaacctaaatcaaattatcccaataattgggagacacaaaagaaaaattacgaaagaaaacaggaaatcaaatcaaaagataaagagaaggtaaaaaaaggcaagaagcactaatgtttaatatttatagttttctccattaaagaaaaagcgatgatgtgtgttctcatcttttgtgaaagtatatatattgcttttgcttttctcaaaagcaaaagactcatccaacaagaacaaaaaaaaaaactaaagctcaatccaaaagacgaagaatgcattggatactacaacttctttttcacttttctttcaaatttacaattatgattttcacaatacagtttattcaaaaataaataaaaaaacgaggcatgaaaataatgattatcctcttcacttattaagccactcactataagcagagcaactccagaacatagtgagcccccaaaacattaaagcatgatgatgtctaatgatgatgatcttcttcgttccatttctctaaatttttgggatttctgcgaagacccttcttctctttctcttctctgaacttcaagattcgtgtcggacaaatttttgtttttatttttctgatgttaca

SEQ ID NO: 123 - DNA, 3000 bp, Arabidopsis thaliana
  misc_feature (1)..(3000): Ceres Promoter PR0924
atctataacgagttaacatgttgccagtttgaatcaagaagcttggatgatgaatgaatggatcggtttgtggtacaattcttaaaattgtagtagaggagacagagaaaaaacatgataagactttggtatttacaacttgacggagacaagacagtaagccaaatctgtcacaaaaacactcaaactcttttctcagtgttttgagtttaaagagagacttattcacttcccctttcgtaacacttatttgtctcccaaccaaacagtttctgtcctttcccttgtcctcccacgtgcatctttatatctcatgacttttcgtttctagatcttgaataatgtcttagtggattaggtttgttgtcggtaaattaggtgaccgtttttttcttatatttggaagatcgcgggatgaagcagatactgagtttcagggcatacacacctaatttgaaaatcattgttagtccaatttcactttaatcttgtttacaaaaaaattgatctgaaaatgttgatgggataagtaaaaatgtaagttttgctagtagtcatgatataataatagcaaaaccagatcaattttgagcaaaaggaagaaacaaaaaacagatcgatcccacgagcaagactaagtgtaaagtggttcccacaagagccatatggatatggtccttcaacttttaaagcccattacttcagtggtcgacccgacattacgccacgagtagtcacgcacgcacgactccgttcacgtgacattcacgttgatatttccccctctactctcttctgcttggttgatctaaaaaacatgaagagaccaacctaatttcatattaatatatgatatagacttcatactcaacagtcactttcgtaatccaaatccatatcttacgaaattagttcttaataaaggttgtggattaagttataatattgtgttaagagttaagacacagcatataaccttgtaccaacagtgctttattcttaaatggaaacaaaacatatgtcaatgtcaagcatacagctaaaatatcattatctaatattaagagtaaaacaagataattaaaaattgaaacaacaccatatttttatagctttacttatcgtatttttctagtcttcatggtaattgtgttgctttattttgtttataaatgaatttggttcgaccagatagtctaatatcagtttttaaacactggttttaataaaatcatatgtcggcaattcaacctgttacgttgtatgattgtatcctagtcaaataggggaggaggtactagtcgtttcaattagtttacgtaatcaatccaaagaaactataagctataaagatcctcaatttgttggttacaataaaaacaacagttgtcaaaatttatgtttataaaaagtaataactatgttccttcccatatagagcaaagtacctcaggataggcaaaccgtacttaatagcccttattcataatttgatccaactcttccccacaaaattgcaactgatgaagtcaatacttgtatagtgagtcaagctataaatgtctagtgatagttttgtctcttaaaaggttaacaaaagttatgacaagctgaaaaatcagagtttgctaggagtattacttacagttatcagtttaagtatcacatttatagtattgtatacaatgattcttaaattccaccttttccgtgcgaaaccaaattttctattggaaacatagaatgtaaacaaaaatatgggacgttgtccgttccaacattaaccaaacttgtctattactaatattcgtgttggtttgatgttggatgtctaaattcgttgaatcatgtgtctcttgacgaaatatgcatcttcttatttcttagtatagatgcactttatcattcttttagtacatgcttaatttttttttttaaaatatgttgattgtcatattgccaaaagtatgaattaaagacgcacatctaacacaagttagcagccgtaaatccttccataaatttattttgcaagttttgctcattatataatgagcggaatttatgatataatcgtttgtaataatgttatgttttgatcaaaatttgaaattaaaagtaggtgagaacttgttatacagtgtagataaggtggatcttgaatataaaaataaaatttataagatgtatttaaagcagaaaagcataaaactttagataaaataatgtaaaaatgtgttagcatcaatgttgggatattggccgacccgaacttaatcaatgtcggaagccattacttctctcccaaaagacctttttccttcggagaactaggaacttcctcactacctttcgcttaacgtgaaagccataaatttcatatattcataaaaatcagaaaatctaaaactgtttagtatcacctgtttttggtatagactattggttttgtgttacttcctaaactatatgatttcgtacttcattggatcttatagagatgaatattcgtaaaaagataagttatctggtgaaacgttacttcagtcatgttgggtctagatttacatactactatgaaacattttaagataataattatcctagccaactatatgttctatattatgggccaagaagatatagaactaaaagttcagaatttaacgatataaattactagtatattctaatacttgaatgattactgttttagttgtttagaataaatagtagcgtgttggttaagataccatctatccacatctatatttgtgtgggttacataaaatgtacataatattatatacatatatatgtatatttttgataaagccatatattactccttgacctctgcccccatttccttttactataaataggaatactcatgatcctctaattcagcaatcaacaccaacgaacacaaccttttccaaagccaataataaaagaacaaaagcttttagtttcatcaaagacgaagctgccttagaa

SEQ ID NO: 124 - DNA, 1000 bp, Arabidopsis thaliana
  misc_feature (1)..(1000): Ceres Promoter YP0388
agaagtattcacgcaccaaggttatatttgtagtgacatattctacaattatcacatttttctcttatgtttcgtagtcgcagatggtcaattttttctataataatttgtccttgaacacaccaaactttagaaacgatgatatataccgtattgtcacgctcacaatgaaacaaacgcgatgaatcgtcatcaccagctaaaagcctaaaacaccatcttagttttcactcagataaaaagattatttgtttccaacctttctattgaattgattagcagtgatgacgtaattagtgatagtttatagtaaaacaaatggaagtggtaataaatttacacaacaaaatatggtaagaatctataaaataagaggttaagagatctcatgttatattaaatgattgaaagaaaaacaaactattggttgatttccatatgtaatagtaagttgtgatgaaagtgatgacgtaattagttgtatttatagtaaaacaaattaaaatggtaaggtaaatttccacaacaaaacttggtaaaaatcttaaaaaaaaaaaaagaggtttagagatcgcatgcgtgtcatcaaaggttctttttcactttaggtctgagtagtgttagactttgattggtgcacgtaagtgtttcgtatcgcgatttaggagaagtacgttttacacgtggacacaatcaacggtcaagatttcgtcgtccagatagaggagcgatacgtcacgccattcaacaatctcctcttcttcattccttcattttgattttgagttttgatctgcccgttcaaaagtctcggtcatctgcccgtaaatataaagatgattatatttatttatatcttctggtgaaagaagctaatataaagcttccatggctaatcttgtttaagcttctcttcttcttctctctcctgtgtctcgttcactagttttttttcgggggagagtgatggagtgtgtttgttgaatagttttgacgatca

SEQ ID NO: 125 - DNA, 283 bp, Arabidopsis thaliana
  misc_feature (1)..(283): Ceres Promoter PD0901
caaagtatttgacaagccatatggttttggatcaaaaagtcggtccaaaattaatgttttatgtgcaagaaccgacccattgtacacacgtgttaacatcttcaagactttcatctctatttttcttttggtcattaagatacccattgatccgaatctgttacattcccacctacttttttaatttttactatccactccaaattaaacacaaccgatgattttaataattggaagctttttaaaatatttctccacgtgcctctttgtgtttgtctatata

SEQ ID NO: 126 - DNA, 1000 bp, Arabidopsis thaliana
  misc_feature (1)..(1000): Ceres Promoter PT0623
aaagttattgacattttgaaaggaccgtaaatattaccaaaaaactgacggagttaggatcggccacgtagaaagggacaaagagagaacagtcacggactcggccagactaagtatgggcctgtctgaatccaaactcagctaagttccaaaagcataaagagagatgtgtaatgaaatgaacgtattctagaaacgaaagcaatgttatgctttgtttttgagccacatgtttttgggagatggagagaatcttttttacgtttttaacctaacccacttggcacttggccaaaaaagtgagaagaaactgtggcgaatgagtaggccacgccatggactttgttccttgtccttcaaaagttaaatttatgttatgcgtggggacaatctaagcaacgtggttcctttaaatatcgcagcttcctcttttacacttttggagcctacgtgttttgttttggaccggccaaatacacgagtcagtcagtttagaaataatttggatgtccaaaaatcttggagatccaaataaaataattagcatgttttagttcataagaatatgaaatgtagataaactgtctatattaatttttccatagaattggctttttatcgaggtgatgtacttaatgactttgttgattactactcgtataacaataaagaatatgatactatgtgagacttataatgaatttggtgtgtgttaattaatccagttgaaacagtttaataacaaatcagaataaaaattgtagtaagaaaatttgaacgctgatccttcaacctagatagtgaacctttcaaatactatatgattcacgtgtaatgtttttgaccgttggttatttttgtgtgaactatattaacttatcaatatcgaaaggctaaataagtaaataactaaaagaaagttcaggaaacaactcgacctaatgacctatcatttctgatcacccgtcctataaatacatacgtaagatcattcgttact

SEQ ID NO: 127 - DNA, 1372 bp, Gossypium hirsutum
  misc_feature: Ceres CLONE ID no.1842178
  misc_feature: Encodes the peptide sequence at SEQ ID NO. 128
aatcctcagtgattgaagggcttcgaacttctctgctttatcttcaatcagggttttagagaataaaaaatcacaaagccttctctttttcactaagaaatggagtctcttactaaactacactgccgtcttcaacctctgcatctctctttcaatcaccaacgtccgtcatttgctaaacccatatcatcttctgtgtctttcaggacttcatcgtcatcgtcaccgttcaaattaacctccatcagagctttatcttcctcatcatcttcatcagttccgctccatcaaacccccaaaccttccctcctccaaacgctagcccctctactcaaaaccacttgcattaccataactgccggcgccgcactcctcttcatgcgcttccaccagaaacccgccctcgccgccaccccaacggtaacacccacggtagagcctgctcaaacggactcgaatgtctccttagaagatcaagagaaaaccattgaggaacacttgactcagtacccaaatgacgttgaagctctacagtcactcatggaggtccgaatcaaatcaagaaaactcccacaagctatcgaagttatcgaccgtttgatccagctcgagcccgaagacaccgaatggccaatgttaagagcccaaattcatagctacagtggcgatttcgcgctagccaagaacgagttcgaagagatattagctaaagacccagttcgtgtcgaggcttttcacggccttgtaatggcttcttcggagtcgggtcaaaagttgaaagagctggaaaaaagaattgaaggggcgatggagaagtgcaagaaagagaagaaaaacaaagattttagagattttaagttattaattgcacaaattcgggtgattgaaggggaccatttggaagctttgaaggtttatgagggtttagttaaggaagaaccaagggattttaggccatatttgtgtatgggaattatttactctttaatgaagaagaaagatgaggctgagaagcattttgaaaaggttaggaaacttgttcctaggaatcacccttatagagagtactttgttgataacatggtggccacaaagcttttctctgaaagggctgagagggaaggcgcttgaaagagttgggacacatttgctttgcttgaatgatggtttttacaaagaggtgcccttttttgtcatacttttaatcagtcacttggttttttttccccctttttagttatttttcaatgtttttgcagcaatttggatatttgtttatagttaggtcggtatttagtgcagtaatatgcatagtgatgaaaaggcataatcgatataattgagttggttgtctaaaaaaaaaaaaaaaaaa

SEQ ID NO: 128 - protein, 343 aa, Gossypium hirsutum
  misc_feature: Ceres CLONE ID no. 1842178
  misc_feature: Score of 966.9 for HMM of FIGURE 3
  misc_feature (141)..(174): Pfam Name: TPR_2 Pfam Description: Tetratricopeptide repeat
  misc_feature: Functional Homolog of  Ceres CLONE ID no. 13930 at SEQ ID NO. 104
MESLTKLHCRLQPLHLSFNHQRPSFAKPISSSVSFRTSSSSSPFKLTSIRALSSSSSSSVPLHQTPKPSLLQTLAPLLKTTCITITAGAALLFMRFHQKPALAATPTVTPTVEPAQTDSNVSLEDQEKTIEEHLTQYPNDVEALQSLMEVRIKSRKLPQAIEVIDRLIQLEPEDTEWPMLRAQIHSYSGDFALAKNEFEEILAKDPVRVEAFHGLVMASSESGQKLKELEKRIEGAMEKCKKEKKNKDFRDFKLLIAQIRVIEGDHLEALKVYEGLVKEEPRDFRPYLCMGIIYSLMKKKDEAEKHFEKVRKLVPRNHPYREYFVDNMVATKLFSERAEREGA

SEQ ID NO: 129 - protein, 326 aa, Arabidopsis thaliana; identical to SEQ ID NO: 104
  misc_feature: Public GI no. 18413971
  misc_feature: Score of 880.6 for HMM of FIGURE 3
  misc_feature (271)..(304): Pfam Name: TPR_2 Pfam Description: Tetratricopeptide repeat
  misc_feature: Functional Homolog of  Ceres CLONE ID no. 13930 at SEQ ID NO. 104

SEQ ID NO: 130 - DNA, 1367 bp, Glycine max
  misc_feature: Ceres CLONE ID no.1044646
  misc_feature: Encodes the peptide sequence at SEQ ID NO. 131
gttgcagtaagtacccaaatcaatgttcacactcacttctccttcttccagggccttacccatggattctcttcccaaattgcgccacccttctccatttcccactcccttatcctcttccctctccttccgctctttaccgccaccccattttccttcgtcgtcgtttaggttaccctccatcagagcctcctcctcaccctcccaaaacgaccccgcttttcgcaccccgagaaacacgccctccctcccccccctcctccaaaccctaacctccttcctctcccccctcctcgaaaccacctgcatcgtcatcgccgccgccgccttcttcttcatgcgcttccaccacacgcccgccgtcatcgccgctccgctcacttcccccgccgcggaaaccgacaccgccttcacccaggaggaagccgagaggcttctcgaagagcgtctgagcaccaaccctcgcgataccgaggcgctccacgcgctcatggaggtcaaaatcaaagcgcgtaagatggacgaagcgttcgaggttttgaaccgtctgattgagctcgaaccggaggagcaggagtggccgctcctgaaggcaaacatgcacatctacaacgacgaccacgccagcgcgcgcaaactgttcgaggaaatcctcaagaaagacccgctccgcgtggaagcgtttcacggcctcgtcatggcgactgcgcagtccaacgagcccttgaaaagtttgttgaagagagtggaagaagcaattgaggtgtgcaaaaagcaaaagaaggattccgatgttagagacttcaggctcttgattgcgcagattaaagtcatggaaggagattacactgaagcactcaaggcttatcaggaattggtgaaggaagagcctagggattttagaccttacttgtgtcagggtattatttatactctccttaggaagaaagatgaagctgataaacaattcaataagtttcgcaggcttgttcccaaggaccatccttacaaggactatttcgaggacaacatgttcgctaccaagttcttctcgcagaaattggagagggagggagctggtgctaggggctgagaaaggttatcactcttgtgattgtcacagagctcctaatgagtttttttttgtcttatcttgtcccttttccttatactgatattcaggtgttgccataggaggttattagtttaatagtttttagtttttcctcgtaataatggttcgaaattactgttggttaggtttctggtggatataaatggtagggttaatgaagagaatctatttttgtgcaaaaaaaaaaaaaaaaaaaaaaaaaaaaaaaaaaaaaccaaaaaaaaaaaaaaaa

SEQ ID NO: 131 - protein, 343 aa, Glycine max
  misc_feature: Ceres CLONE ID no. 1044646
  misc_feature: Score of 949.1 for HMM of FIGURE 3
  misc_feature (246)..(279): Pfam Name: TPR_2 Pfam Description: Tetratricopeptide repeat
  misc_feature: Functional Homolog of  Ceres CLONE ID no. 13930 at SEQ ID NO. 104
MDSLPKLRHPSPFPTPLSSSLSFRSLPPPHFPSSSFRLPSIRASSSPSQNDPAFRTPRNTPSLPPLLQTLTSFLSPLLETTCIVIAAAAFFFMRFHHTPAVIAAPLTSPAAETDTAFTQEEAERLLEERLSTNPRDTEALHALMEVKIKARKMDEAFEVLNRLIELEPEEQEWPLLKANMHIYNDDHASARKLFEEILKKDPLRVEAFHGLVMATAQSNEPLKSLLKRVEEAIEVCKKQKKDSDVRDFRLLIAQIKVMEGDYTEALKAYQELVKEEPRDFRPYLCQGIIYTLLRKKDEADKQFNKFRRLVPKDHPYKDYFEDNMFATKFFSQKLEREGAGARG

SEQ ID NO: 132 - DNA, 1803 bp, Gossypium hirsutum
  misc_feature: Ceres CLONE ID no.1918241
  misc_feature: Encodes the peptide sequence at SEQ ID NO. 133
aaacactttctctttctctccctttccctctccctctctcaaattctagggttttttttttttttttaatttctctgatttctcaatctccacgttttaatttcttgaaatctttttggatttcttttcgatggaatcgattagatcgccctattggtgctacagatgcaatcgattcatccggatccgggtccgatctccccatgattcgctcaactgccccgactgtggcggaggattcatcgaagaaattgaaacaccctctcgatctcccatccaccaccgtttccctgccgctgccatgtattccgacacgccaagccctgcgctcagcccaagccccaccgccactcctcatttccgccgaactcgtcggaacgctggcgatcgctcccctttcaatcccgttgttgtcctccgtggacccacctccgaatccgaaggcatagttaccgaaagagggaacagaaatttcgagctttattacgatgatggctctggctcgggtcttcgtcccttacctgctagcatgtcggagtttttaatggggtcgggttttgatcggcttcttgatcagttatctcaattagaagcaaacggagttggccgttttgagcaacctcctgcttcgaaagcggcaattgaatcaatgcctgtgattaagatcctagggagccacgtaaggtcggaatctcactgtgcagtttgtaaggagcctttcgagctcgactccgaagcacgggaaatgccttgtaagcatatttaccattcggattgcattttaccttggctttctattcgaaactcttgtcctgtttgtcgccatgaattgccaacagaaaataatggaaataactttgcggaaaacgaggctgttagagatgaagaagctgtgggattaaccatatggaggttaccgggaggtggctttgcagtggggaggtttactggagggacgagagcagcggagagggagtttccactagtgttcacggagatggatggtgggtttaataatgcgggtgctgctcctagaagaatttcgtgggcgcctagtgggagaaggtcacaagagagtagaggtttagggcgtgtttttcggagttttgtttctttctttgggaggtttaggagttcgtcacgttcaggttcagattctggatttacaaggagaagtagatcgagttcagtgttcggtagatcatcgagaagggatagcgactgggatttcgaggattgagtgatggtcgaatgtatcttttgttcattttgatgttagccttcctgtcccatttactctgatactacaatattgcagttttcctaaggaagggaatgtttgtagattgtatgattttaattggatgtaaataacgacacttttggtgaaggagtggagcattattcgagtttagtttctgccgaaagagaaagaggctttgatgagtcataatatgcatcaatgtggctgaagaagaagaagaagaagtagagaaggagaaagttttgtggctagtttggccatttagtggttgctgaggtactaatcctcgcatataaattgatgttaggccgcctaaaaatgttcaattagtaagttttgtcacgataagttatgctgttctctcttgcttacatgtatttattatcagaaatttgttgtttatttgtagttcttaaatcaaattgagtcctatatgttgcttttttgggtttacttgactggaagccaatcttcctgctaccattgggctacttgttttatattttgtttgaattacttaaaaaaaaaaaaaaaaaaaa

SEQ ID NO: 133 - protein, 369 aa, Gossypium hirsutum
  misc_feature: Ceres CLONE ID no. 1918241
  misc_feature: Score of 954.7 for HMM of FIGURE 6
  misc_feature (190)..(230): Pfam Name: zf-C3HC4 Pfam Description: Zinc finger, C3HC4 type (RING finger)
  misc_feature (254)..(361): Pfam Name: DUF1117 Pfam Description: Protein of unknown function (DUF1117)
  misc_feature: Functional Homolog of  Ceres CLONE ID no. 21863 at SEQ ID NO. 89
MESIRSPYWCYRCNRFIRIRVRSPHDSLNCPDCGGGFIEEIETPSRSPIHHRFPAAAMYSDTPSPALSPSPTATPHFRRTRRNAGDRSPFNPVVVLRGPTSESEGIVTERGNRNFELYYDDGSGSGLRPLPASMSEFLMGSGFDRLLDQLSQLEANGVGRFEQPPASKAAIESMPVIKILGSHVRSESHCAVCKEPFELDSEAREMPCKHIYHSDCILPWLSIRNSCPVCRHELPTENNGNNFAENEAVRDEEAVGLTIWRLPGGGFAVGRFTGGTRAAEREFPLVFTEMDGGFNNAGAAPRRISWAPSGRRSQESRGLGRVFRSFVSFFGRFRSSSRSGSDSGFTRRSRSSSVFGRSSRRDSDWDFED

SEQ ID NO: 134 - DNA, 1513 bp, Gossypium hirsutum
  misc_feature: Ceres CLONE ID no.1938564
  misc_feature: Encodes the peptide sequence at SEQ ID NO. 135
aatttaagcattccatctctcactcaaattctagggattttaattttctcctatttctgaaaatttccggcttttcatttcatttccatggaatcgattacatcaccctattggtgttacagatgtaatcgctttatacgagtccggatccgatccccccatgattcggttcattgcctccactgcggcggaggattcatcgaagaaatccaaacaccctctcgatctcccatcgatcaccgtttccccgtcgcatccttgtactccggcactcccagtctgagccccagccccaccgccactcatcgtttccgtcgagctcgacgaaacgctggcgatcgctcccctttctatcccgtcgtcgtactccgtggaccctcctccgaaacggacggcgaacttcccgaaagagggaataccagttttgagctttattatgatgatgggtccgggtcgggtcttcgtcatttacccgatagcatgtcggaatttttaatgggttctgattttgataggcttcttgatcagttatcccagttacaagtaaacgaagttggtcgcttcgagcagccgcccgcttcaaaagcagcgattgaatcaatgccggtgataagaatcgttggaaggcacatcaggtcggactctcactgtgcagtttgcaaagaacctttcgaacttgattccgaagctcgggaaatgccttgtaagcatatttaccattcggactgtattgtaccttggctttcgattcgaaactcttgtccagtttgccgccatgaactgccaattgaaggtaacaatttaggggaaaatgaggctgtgggattaacaatatggagactgcctggaggtgggtttgcagtggggaggcttactggagggaggagagcagcggagagggagttcccattggtgtttacagagatggatggcgggtttaataacgcggctgctcctagaaggatttcattggcgcccagtgggagaaggtcgcaaatagagagcagaggattccggcgggtttttccggagttttgtttctttttttgggaggtttaggagttcatctcgttcaggctcagattctgggtttacaaggagaagtcgatcgctttcggtgtttaatagatcttctagaagggatagcgactgagatttcgaggaatcgaatgcggtttttgttgggtattcagttttaggttaacctttgatgctacaatgttgcagctttccgaggaatggaatgtttatagattgcatgattttacttggatgtaaataacaacacttttggtgaagctatgagtctttatgtgcaccattgaggaagaaggaagtggatgaaggagaaagttttgtggctagtaagatcctttagtggttgcttaaagcactgatcttggtggctaaaagtactcattagtaggttttgtgatgataacttatgctcttgtactatcaggaattttgttgtttatttgttaatgcaaattattcattggttcgtgtcatt

SEQ ID NO: 135 - protein, 323 aa, Gossypium hirsutum
  misc_feature: Ceres CLONE ID no. 1938564
  misc_feature: Score of 639.2 for HMM of FIGURE 6
  misc_feature (188)..(228): Pfam Name: zf-C3HC4 Pfam Description: Zinc finger, C3HC4 type (RING finger)
  misc_feature (244)..(294): Pfam Name: DUF1117 Pfam Description: Protein of unknown function (DUF1117)
  misc_feature: Functional Homolog of  Ceres CLONE ID no. 21863 at SEQ ID NO. 89
MESITSPYWCYRCNRFIRVRIRSPHDSVHCLHCGGGFIEEIQTPSRSPIDHRFPVASLYSGTPSLSPSPTATHRFRRARRNAGDRSPFYPVVVLRGPSSETDGELPERGNTSFELYYDDGSGSGLRHLPDSMSEFLMGSDFDRLLDQLSQLQVNEVGRFEQPPASKAAIESMPVIRIVGRHIRSDSHCAVCKEPFELDSEAREMPCKHIYHSDCIVPWLSIRNSCPVCRHELPIEGNNLGENEAVGLTIWRLPGGGFAVGRLTGGRRAAEREFPLVFTEMDGGFNNAAAPRRISLAPSGRRSQIESRGFRRVFPEFCFFFWEV

SEQ ID NO: 136 - DNA, 1212 bp, Populus balsamifera subsp. trichocarpa
  misc_feature: Ceres ANNOT ID no.1464854
  misc_feature: Encodes the peptide sequence at SEQ ID NO. 137
atgtcatctccaactacgccgtcgtattggtgctatagatgcaaccgtttcgttcaggtttggagacaagactcggtaacttgcccagaatgtgaatccgggttcattgaagaaatcgaaaaccctccgcacatgattcaaacagaagcatcacgtgaaaggcaccgccgactttctcccgctgccggaacgatgttcatgatcggtaaccgctcaaacccccatcgccgtaaccgtcgcggtggagccgccgggagcggagaccggtccccgatcaatccagtgatcgtgcttcgtggcgggcctggaggggcggcggaggacgtagtgggagatgacggtggccgcggtggtggagggttcgagctttattatgatgacggtggtgggtccgggttgaggccgttgccgccgagcatgtcggaatttttattgggatcagggtttgagagattgttagatcagttaacacatattgaaatgaatggagggtttggccgctatgagaatcagcacccgccggcgtcaaagtcggcgattgaatcgatgcctacggtaattattaacgaatctcatacttttaccgaatcgcattgtgctgtttgtaaggaggcttttgaattagaatccgaagcacgagagatgccttgtaaacatatctatcatactgattgtatacttccttggttatctattcgtaattcttgtccggtttgtcgacatgaattgccttctggtgatgatgacggtgaggatggggttgggagtccgttacctgaagcagggaatggacagggaaataacgaggaggaggcagttgggctgacgatatggaggttacctggaggagggtatgcggtggggaggtttacaggggcgaggaggggagaaagagagttgcccgtggtttatacagagatggatggtgcgtttaacaatggtgggttgccgaggaggatatcttgggggtctagagggggtggaaggagggagaatggtggtggggttaatggtggtagagacggtggtaatagagggtttggttttgggagagttttgaggcattggtttgcttgttttggcgtgggacggggttcgagttcaaactccagagtcactgggaggaataggccttctcctgtttttagcagttcctcttcgatgaggagaaggggttggggcgctgagattaatactggaaggagacggtga

SEQ ID NO: 137 - protein, 403 aa, Populus balsamifera subsp. trichocarpa
  misc_feature: Ceres ANNOT ID no. 1464854
  misc_feature: Score of 1045.0 for HMM of FIGURE 6
  misc_feature (199)..(239): Pfam Name: zf-C3HC4 Pfam Description: Zinc finger, C3HC4 type (RING finger)
  misc_feature (272)..(370): Pfam Name: DUF1117 Pfam Description: Protein of unknown function (DUF1117)
  misc_feature: Functional Homolog of  Ceres CLONE ID no. 21863 at SEQ ID NO. 89
MSSPTTPSYWCYRCNRFVQVWRQDSVTCPECESGFIEEIENPPHMIQTEASRERHRRLSPAAGTMFMIGNRSNPHRRNRRGGAAGSGDRSPINPVIVLRGGPGGAAEDVVGDDGGRGGGGFELYYDDGGGSGLRPLPPSMSEFLLGSGFERLLDQLTHIEMNGGFGRYENQHPPASKSAIESMPTVIINESHTFTESHCAVCKEAFELESEAREMPCKHIYHTDCILPWLSIRNSCPVCRHELPSGDDDGEDGVGSPLPEAGNGQGNNEEEAVGLTIWRLPGGGYAVGRFTGARRGERELPVVYTEMDGAFNNGGLPRRISWGSRGGGRRENGGGVNGGRDGGNRGFGFGRVLRHWFACFGVGRGSSSNSRVTGRNRPSPVFSSSSSMRRRGWGAEINTGRRR

SEQ ID NO: 138 - DNA, 1359 bp, Populus balsamifera subsp. trichocarpa
  misc_feature: Ceres ANNOT ID no.1511378
  misc_feature: Encodes the peptide sequence at SEQ ID NO. 139
atgtcatctccaacaacgccgtctttttggtgctatggatgcagccgtttcgttcaggtttggagacaagactcgttaacttgcgcagaatgtgaatccgggttcattgaagaaatcgaaaacccaccgcacgtaattcaaacagaaatatcgagtgaccgacaccgcaggttttctcccgctgccggaaccatgttcatgatcggtaaccgctcaaacccccataaccggaaccgacggggtggtggcgccgggagcggagaccggtctccgatgaatcctgtgatcttgcttcgtggtggggctggaggggcggcggatgacgtggtgggagacgacggtggccgaggtggtggtgggtttgagctttattacgatgacggtggtgggtccgggttgaggccgttgccgccgagcatgtcggagtttttgttgggatcagggtttgagagattgttagatcagttagcacagattgaaataaatggagggtttggtcggtatgagaatcagcatccaccggcctcgaaatccgcgattgaatcgatgcctacggtaattgttaatgaatcccatatttttactgaatctcattgtgctgtttgtaaagaggcttttgaattagaatccgaagcacgggagatgccttgtaaacatatttatcatactgattgtatacttccttggttatctattcgtaattcttgccctgtttgtcgacgtgagttgccttctggtgatgatgatggtggcgatggtgataatggggttgtgagtccgttgcctgaagcggggaatgggcagggaaataacgaggaggaggcagttggattgacgatatggaggttacccggaggagggtatgcggtggggaggtttacaggggcgaggaggggagaaagggagttgcctgtggtttatacagagatggatggtgcctttaacaatggtggattgccgaggaggatatcttgggggtctagagggggtggaaggagggaaaatggtggtgggggtagtggtggtaatagacggcttggttttgggagagttttgaggcactggtttgcttgttttggcacggggcagagttcgaatttggattccagagttacagggagcagtaggccatattcagtttttagcagttcctcttcaatgaggagaagagactgggctagagagattaacagtgcaaggagacggtgcttgttactgaaatgtatatatggagatttgagaatgactccaattgcgagttcaattcataatctatcgaaaactgatggtttgatgaattgtggaggaacaatgcaatctcaacaaatgacctgcgaagaagcattaggagcaagctag

SEQ ID NO: 139 - protein, 452 aa, Populus balsamifera subsp. trichocarpa
  misc_feature: Ceres ANNOT ID no. 1511378
  misc_feature: Score of 922.6 for HMM of FIGURE 6
  misc_feature (199)..(239): Pfam Name: zf-C3HC4 Pfam Description: Zinc finger, C3HC4 type (RING finger)
  misc_feature (275)..(394): Pfam Name: DUF1117 Pfam Description: Protein of unknown function (DUF1117)
  misc_feature: Functional Homolog of  Ceres CLONE ID no. 21863 at SEQ ID NO. 89
MSSPTTPSFWCYGCSRFVQVWRQDSLTCAECESGFIEEIENPPHVIQTEISSDRHRRFSPAAGTMFMIGNRSNPHNRNRRGGGAGSGDRSPMNPVILLRGGAGGAADDVVGDDGGRGGGGFELYYDDGGGSGLRPLPPSMSEFLLGSGFERLLDQLAQIEINGGFGRYENQHPPASKSAIESMPTVIVNESHIFTESHCAVCKEAFELESEAREMPCKHIYHTDCILPWLSIRNSCPVCRRELPSGDDDGGDGDNGVVSPLPEAGNGQGNNEEEAVGLTIWRLPGGGYAVGRFTGARRGERELPVVYTEMDGAFNNGGLPRRISWGSRGGGRRENGGGGSGGNRRLGFGRVLRHWFACFGTGQSSNLDSRVTGSSRPYSVFSSSSSMRRRDWAREINSARRRCLLLKCIYGDLRMTPIASSIHNLSKTDGLMNCGGTMQSQQMTCEEALGAS

SEQ ID NO: 140 - DNA, 1425 bp, Populus balsamifera subsp. trichocarpa
  misc_feature: Ceres ANNOT ID no.1458137
  misc_feature: Encodes the peptide sequence at SEQ ID NO. 141
atgtcatctccaacaacgccgtctttttggtgctatggatgcagccgtttcgttcaggtttggagacaagactcgttaacttgcgcagaatgtgaatccgggttcattgaagaaatcgaaaacccaccgcacgtaattcaaacagaaatatcgagtgaccgacaccgcaggttttctcccgctgccggaaccatgttcatgatcggtaaccgctcaaacccccataaccggaaccgacggggtggtggcgccgggagcggagaccggtctccgatgaatcctgtgatcttgcttcgtggtggggctggaggggcggcggatgacgtggtgggagacgacggtggccgaggtggtggtgggtttgagctttattacgatgacggtggtgggtccgggttgaggccgttgccgccgagcatgtcggagtttttgttgggatcagggtttgagagattgttagatcagttagcacagattgaaataaatggagggtttggtcggtatgagaatcagcatccaccggcctcgaaatccgcgattgaatcgatgcctacggtaattgttaatgaatcccatatttttactgaatctcattgtgctgtttgtaaagaggcttttgaattagaatccgaagcacgggagatgccttgtaaacatatttatcatactgattgtatacttccttggttatctattcgtaattcttgccctgtttgtcgacgtgagttgccttctggtgatgatgatggtggcgatggtgataatggggttgtgagtccgttgcctgaagcggggaatgggcagggaaataacgaggaggaggcagttggattgacgatatggaggttacccggaggagggtatgcggtggggaggtttacaggggcgaggaggggagaaagggagttgcctgtggtttatacagagatggatggtgcctttaacaatggtggattgccgaggaggatatcttgggggtctagagggggtggaaggagggaaaatggtggtgggggtagtggtggtaatagacggcttggttttgggagagttttgaggcactggtttgcttgttttggcacggggcagagttcgaatttggattccagagttacagggagcagtaggccatattcagtttttagcagttcctcttcaatgaggagaagagactgggctagagagattaacagtgcaaggagacggtgcttgttactgaaatgtatatatggagatttgagaatgactccaattgcgagttcaattcataatctatcgaaaactgatggtttgatgaattgtggaggaacaatgcaatctcaacaaatgacctgcgaagaagcattaggagcaagacaaacatgtgctgtcaaagttgagcctggaatccgaattatctgtcttgctcagctagagttgcaataa

SEQ ID NO: 141 - protein, 474 aa, Populus balsamifera subsp. trichocarpa
  misc_feature: Ceres ANNOT ID no. 1458137
  misc_feature: Score of 922.6 for HMM of FIGURE 6
  misc_feature (199)..(239): Pfam Name: zf-C3HC4 Pfam Description: Zinc finger, C3HC4 type (RING finger)
  misc_feature (275)..(394): Pfam Name: DUF1117 Pfam Description: Protein of unknown function (DUF1117)
  misc_feature: Functional Homolog of  Ceres CLONE ID no. 21863 at SEQ ID NO. 89
MSSPTTPSFWCYGCSRFVQVWRQDSLTCAECESGFIEEIENPPHVIQTEISSDRHRRFSPAAGTMFMIGNRSNPHNRNRRGGGAGSGDRSPMNPVILLRGGAGGAADDVVGDDGGRGGGGFELYYDDGGGSGLRPLPPSMSEFLLGSGFERLLDQLAQIEINGGFGRYENQHPPASKSAIESMPTVIVNESHIFTESHCAVCKEAFELESEAREMPCKHIYHTDCILPWLSIRNSCPVCRRELPSGDDDGGDGDNGVVSPLPEAGNGQGNNEEEAVGLTIWRLPGGGYAVGRFTGARRGERELPVVYTEMDGAFNNGGLPRRISWGSRGGGRRENGGGGSGGNRRLGFGRVLRHWFACFGTGQSSNLDSRVTGSSRPYSVFSSSSSMRRRDWAREINSARRRCLLLKCIYGDLRMTPIASSIHNLSKTDGLMNCGGTMQSQQMTCEEALGARQTCAVKVEPGIRIICLAQLELQ

SEQ ID NO: 142 - DNA, 936 bp, Populus balsamifera subsp. trichocarpa
  misc_feature: Ceres ANNOT ID no.1454043
  misc_feature: Encodes the peptide sequence at SEQ ID NO. 143
atggcttcatcaatcgagtcctcattctggtgctacagatgcaaccgatccatccggctccccacccaagattcaattctctgccccgactgcggcggcggattcatcgaagaaatcggcatcacccgtccccaccaccgactcaccgccgcccatcgcacccgtctccgtaccggcggagaccactctcccttcaatccagtcatcatcctccgcggtgccactaccgacttagcatccgggaacttcgagctttactacgacgacggtgcagcgtcgggtctcaggcctttgcccgctagcatatcggagctcttgatggattctgggtttgaacgcctccttgatcagttgactcaaatggaaatcaacggcgtaggtcgattcgatcatccacaagcatctaaagcagccatcgaatcgatgccagtaataaaaatactgaattctcacgtttctatggaatcccaatgcgctgtttgcaaagaagcttttgaaattaataccgaggctcgcgaaatgccttgtaatcacatttatcattctgattgtattttaccctggttatcaatccgtaattcgtgtccggtttgtcgtcatgagttacccaccgaaactggaagtgggagtgggagaaattcgccggaatcagatgaggagaccgttggtttaatgatatggagattgcccggacgtggttttgcagttgggaggttttctggaggaaggagagcagcagagagggagctaccgcttgtgtttacggagatggatggtggatttaataatgcgggtttgcctaggagtatttcatgggctcctgatgggaggagatcaagagagagtggaggagtggggcgtgcttttcggaatttcttctcgtttttcaggaggattggaaggcgttcgagtaaccattctggtcaaagagcatga

SEQ ID NO: 143 - protein, 311 aa, Populus balsamifera subsp. trichocarpa
  misc_feature: Ceres ANNOT ID no. 1454043
  misc_feature: Score of 575.5 for HMM of FIGURE 6
  misc_feature (158)..(198): Pfam Name: zf-C3HC4 Pfam Description: Zinc finger, C3HC4 type (RING finger)
  misc_feature (221)..(298): Pfam Name: DUF1117 Pfam Description: Protein of unknown function (DUF1117)
  misc_feature: Functional Homolog of  Ceres CLONE ID no. 21863 at SEQ ID NO. 89
MASSIESSFWCYRCNRSIRLPTQDSILCPDCGGGFIEEIGITRPHHRLTAAHRTRLRTGGDHSPFNPVIILRGATTDLASGNFELYYDDGAASGLRPLPASISELLMDSGFERLLDQLTQMEINGVGRFDHPQASKAAIESMPVIKILNSHVSMESQCAVCKEAFEINTEAREMPCNHIYHSDCILPWLSIRNSCPVCRHELPTETGSGSGRNSPESDEETVGLMIWRLPGRGFAVGRFSGGRRAAERELPLVFTEMDGGFNNAGLPRSISWAPDGRRSRESGGVGRAFRNFFSFFRRIGRRSSNHSGQRA

SEQ ID NO: 144 - protein, 407 aa, Arabidopsis thaliana
  misc_feature: Public GI no. 18424254
  misc_feature: Score of 1018.8 for HMM of FIGURE 6
  misc_feature (199)..(239): Pfam Name: zf-C3HC4 Pfam Description: Zinc finger, C3HC4 type (RING finger)
  misc_feature (259)..(398): Pfam Name: DUF1117 Pfam Description: Protein of unknown function (DUF1117)
  misc_feature: Functional Homolog of  Ceres CLONE ID no. 21863 at SEQ ID NO. 89
MPSTPTTPTTTTPITASYWCYSCTRFVSVWADQGTTTVGSVACPHCDGGFIEQINDSSSAATELTIPASTEVRSINNNRRSVIRRRRSGRRPSFNPVIVLQGGAGEREEGEEGDAARDRRAFEFYYDDGSGSGLRPLPDSVSEILMGSGFERLLEQLSQIEASATGIGRSGNPPASKSAIESLPRVEISDCHIGSEANCAVCTEIFETETEAREMPCKHLFHDDCIVPWLSIRNSCPVCRFELPSEPNRRSNNNEEDNAVGMTIWRLPGGGFAVGRFNAAMRDGERVLPVVLTEMDGGGIGNSQDGPRRISWVRSHGTLESDSNGTGSGSGSGGRLRRMVRGMVSLMRRVRPNRSSSSSSAAISTSSDNLDLNIEVESRVLDRSNSVMRRYFRRNRSNRDSSSSVLH

SEQ ID NO: 145 - DNA, 1323 bp, Glycine max
  misc_feature: Ceres CLONE ID no.479514
  misc_feature: Encodes the peptide sequence at SEQ ID NO. 146
acacacactctctcccttgtttctctctcttcggtcagaaacatgaatttggaaacgcaaccaggaacggcgtcgtattggtgctacagctgcacccgtttcgtgcacctctctgtccaaagcaccatcgcctgcccccactgtcaaagcggtttcgtcgaagagatccgtgccggcgccggagccgaagcctcgccacgccatcgactaagtcctttccccgatgatcctcttttgctccggcgacagggcttccgccgccgtaggagagaagcttccggcaaccgctccccgttcaaccccgttatcgtcctccgcggccccggcgacgactccgccgccgccgaccacgacggcgtcagcacgttcgagctcttctacgacgacggcgacggcaccggcctccgccctcttcctcccaccatgtcggagttgctcctcggctctggctttgacaaacttctcgaacagttcgcgcagatcgagatgaacggattcgggcggccggagaatccgccggcgtcaaaggcggcgatcgagtccatgccgacggtcgagatcggagaaacgcacgtggaaaccgaagcgcactgcgccgtgtgcaaagaagcgtttgagctgcacgcggaggcgcgtgagttaccgtgcaagcacatctaccactccgattgcatcctcccgtggctctcgatgcggaattcgtgcccggtgtgccgccacgagcttccttccgatttggaaactagggttcccagccagatcgacgaggagacgatagggttaacgatttggaggcttcccggcggcggattcgccgtggggagattctccggcggccggagaacaggcgagagtcatttcccggtggtgtacacggagatggacggtggactgaacacgaacggtggtgctcctaggagaatttctcgttctgttagaagcaatagggttagggaaagtcgagggtttggtagagttattagcaatttcttttcattctttggaagaattggttctagaaactcttcttctggacatgggtctgtaagtagaagccgtagtcacgtgagttcaatcttcaatagaagctcgcggagacatagcaggacttgggttatggatgattaattggtgaatggtgatggcaattttgcaaagaatagtaatactttcttttttttcagctttgggttatgagattcatttcatactgtaaatagcatgtaactagcaactatagaagcaagttttttagttttccctctctgggaatctttaatatggtttgattcaacatcaatggaaggaagagtgctatttttt

SEQ ID NO: 146 - protein, 361 aa, Glycine max
  misc_feature: Ceres CLONE ID no. 479514
  misc_feature: Score of 930.1 for HMM of FIGURE 6
  misc_feature (184)..(224): Pfam Name: zf-C3HC4 Pfam Description: Zinc finger, C3HC4 type (RING finger)
  misc_feature (244)..(357): Pfam Name: DUF1117 Pfam Description: Protein of unknown function (DUF1117)
  misc_feature: Functional Homolog of  Ceres CLONE ID no. 21863 at SEQ ID NO. 89
MNLETQPGTASYWCYSCTRFVHLSVQSTIACPHCQSGFVEEIRAGAGAEASPRHRLSPFPDDPLLLRRQGFRRRRREASGNRSPFNPVIVLRGPGDDSAAADHDGVSTFELFYDDGDGTGLRPLPPTMSELLLGSGFDKLLEQFAQIEMNGFGRPENPPASKAAIESMPTVEIGETHVETEAHCAVCKEAFELHAEARELPCKHIYHSDCILPWLSMRNSCPVCRHELPSDLETRVPSQIDEETIGLTIWRLPGGGFAVGRFSGGRRTGESHFPVVYTEMDGGLNTNGGAPRRISRSVRSNRVRESRGFGRVISNFFSFFGRIGSRNSSSGHGSVSRSRSHVSSIFNRSSRRHSRTWVMDD

SEQ ID NO: 147 - DNA, 1204 bp, Glycine max
  misc_feature: Ceres CLONE ID no.1240790
  misc_feature: Encodes the peptide sequence at SEQ ID NO. 148
atttcatatatcctctctcagcctaaacttctgggttgcaaaaatgaattcggacacgacttcctattggtgctacagctgcacgcgcttcgttcacatacaagaacagaacgacgtcgtttgcccgcgctgccacggcggcttcgtcgaaaaggtcaccgccccccaatcgtcaaggcaaggcttccgccgccgacgccgcaacgccgggaaccactcggcgttcaacccggtgatcgtgctccgcggaccgggagaggacgaggagagcagctttgagttatactacgacggcttcgacggcgaggggctccgcccgctgccatccaccatgtcggagttcttgcttggatcgggattcgaccggttgctggagcaggtttcgcagatcgagatcaacggcctcgggagggctgagaatccaccggcgtctaaggcggctatagagtcaatgccgacggtggaaatcaccgagtctcacgtcgcgtcggagacgatctgcgccgtgtgcaaggaagccttcgagcttggcgcgttggcgcgtgagatgccgtgtaagcatctctaccactccgattgcattctcccgtggctttcgatgcgaaactcgtgtccggtgtgccgccacgagttgccgtcggagcaaaccgcgccggaaacaagagtcgccggccagatcgaggaggaggctgtagggttgaccatatggaggttgccgggcgggggattcgccgtcgggaggttcgccggagagagccacttgccggtggtttacacggagatggagagtgacgggaactccaacgaaggttctagaagaatctctctggcggttggaagcggcagagttagggaaagtcgtggtggtggatttgggagaattttccgcaatttgtttgggagaattggggctttgactagaagccgtagcctttcaacttcactcttcaatagaagaagttctagagcctgggttttgggaaattgatttggatggagttagtttttggaaaacaagctttttaatttcagttcagaattgagattcttattgtaaataggggcagttagattcaaaatttctttgcaatttgcgttatatcaatagatgtttttctccagaaatgatcgccgaaggggactcgagagaaagattgttcttgctgcagaacatacgttctgggggaagaagacatgcttaatt

SEQ ID NO: 148 - protein, 314 aa, Glycine max
  misc_feature: Ceres CLONE ID no. 1240790
  misc_feature: Score of 598.7 for HMM of FIGURE 6
  misc_feature (153)..(193): Pfam Name: zf-C3HC4 Pfam Description: Zinc finger, C3HC4 type (RING finger)
  misc_feature (216)..(289): Pfam Name: DUF1117 Pfam Description: Protein of unknown function (DUF1117)
  misc_feature: Functional Homolog of  Ceres CLONE ID no. 21863 at SEQ ID NO. 89
MNSDTTSYWCYSCTRFVHIQEQNDVVCPRCHGGFVEKVTAPQSSRQGFRRRRRNAGNHSAFNPVIVLRGPGEDEESSFELYYDGFDGEGLRPLPSTMSEFLLGSGFDRLLEQVSQIEINGLGRAENPPASKAAIESMPTVEITESHVASETICAVCKEAFELGALAREMPCKHLYHSDCILPWLSMRNSCPVCRHELPSEQTAPETRVAGQIEEEAVGLTIWRLPGGGFAVGRFAGESHLPVVYTEMESDGNSNEGSRRISLAVGSGRVRESRGGGFGRIFRNLFGRIGALTRSRSLSTSLFNRRSSRAWVLGN

SEQ ID NO: 149 - DNA, 1779 bp, Triticum aestivum
  misc_feature: Ceres CLONE ID no.942216
  misc_feature: Encodes the peptide sequence at SEQ ID NO. 150
aacctcctcccctcccttcccccatccccccctgcccccgcgccgccctcccccctgctccgatccaccacccagctccagctccagctccttcttatccagctcagtcggatctggtcctgcggaaagcccgcgccttttctcttcccatggatcggtgggcggccacggctgccggcccagcggcggcgggggcggcagggacgccgtcctactggtgctacagctgcgagcggttcgtgcgcacggcgggggacgccggcctggtctgccccggctgcgacggcggcttcctggagcagatggacgcgccgccgccgcgcagggccgtcgcgccctctgccttcctccgccgccgcgccgcggaggcgcccaccgaggtccggccccgccgcggccggcgcggcggcgcgtcgggggaccgctccggctccccgtacaacccggtcatcgtgctccggcgctccgcggccccgcccggcgacgaggcccccggcgccaccagcagcttcgagctcttctacgacgacggcgccggatccggcctccgcccgctgcccgagagcatgtccgacttcctcatggggtccggcttcgagcgcctcctcgagcagctcgcccagatcgaggccggcggcttcggcgccgtccgcccctgcgacaacccgccggcctccaaggccgccgtcgagtccatgcccaccgtcgtcgtcgccgcctgccacgtcggcgccgactcccactgcgccgtctgcaaggaggccttccagctgggcgacgaggccagggagatgccctgcagccacatgtaccaccaggactgcatcctgccgtggctcgcgctgcgcaactcgtgccccgtgtgccggcacgagctgcccacggacgtggcgcggcctgctccggcgagcgacctgggcggcgctgacgaccagggcagcaacaccggggctgaggctggcagcgaggaggagatgacggtggggttgacgatttggcggcttcctggaggaggctttgccgtcgggaggttcgctggtggccggagggccggcgagagggagctcccagttgtctacaccgaggtggacggcggtttcaacaatggcggtgccccgaggaggatctcatggtcatcaagagggagccgttcgtcgcagaggggagttattagacgcatgttcgacaacatgtttgcttgctttgggcacacccattctaccaatgtgactcgagcctcatcctcgaggtcggagtggagctcggttttcacccgtggtctgaggagccgcagcacaagctggagatcccaagatagccacgccgatgcgatcgccaggtgatcactgcatcacgcattggggaatattacgacattagatgttggagagccgcagatgtttgcttccgtttgatgttttctatatataagtcagttgagagataaagaggatttgtagagcgcaaattgcatgctgtttttgtacatagaagagcagaactagagatgttgcaatggaaatgtcctccagtttgcgtattcaagacggttggtcttccttttgcattttggagtatcattcagcaagacaagttttgttactgatagatgcaagcatctggacagtgagcgcttaaattgctggcagcactcaattgtttcttcgaattccatctcgctcaatgcgacgggggttcgtcctttgtaaccatgacttgttggaaggtttagaccgtagcaaagattcaataaagcatcactcaaaaaaaaaaaaaaaa

SEQ ID NO: 150 - protein, 397 aa, Triticum aestivum
  misc_feature: Ceres CLONE ID no. 942216
  misc_feature: Score of 666.2 for HMM of FIGURE 6
  misc_feature (199)..(239): Pfam Name: zf-C3HC4 Pfam Description: Zinc finger, C3HC4 type (RING finger)
  misc_feature (277)..(391): Pfam Name: DUF1117 Pfam Description: Protein of unknown function (DUF1117)
  misc_feature: Functional Homolog of  Ceres CLONE ID no. 21863 at SEQ ID NO. 89
MDRWAATAAGPAAAGAAGTPSYWCYSCERFVRTAGDAGLVCPGCDGGFLEQMDAPPPRRAVAPSAFLRRRAAEAPTEVRPRRGRRGGASGDRSGSPYNPVIVLRRSAAPPGDEAPGATSSFELFYDDGAGSGLRPLPESMSDFLMGSGFERLLEQLAQIEAGGFGAVRPCDNPPASKAAVESMPTVVVAACHVGADSHCAVCKEAFQLGDEAREMPCSHMYHQDCILPWLALRNSCPVCRHELPTDVARPAPASDLGGADDQGSNTGAEAGSEEEMTVGLTIWRLPGGGFAVGRFAGGRRAGERELPVVYTEVDGGFNNGGAPRRISWSSRGSRSSQRGVIRRMFDNMFACFGHTHSTNVTRASSSRSEWSSVFTRGLRSRSTSWRSQDSHADAIAR

SEQ ID NO: 151 - DNA, 1312 bp, Zea mays
  misc_feature: Ceres CLONE ID no.987194
  misc_feature: Encodes the peptide sequence at SEQ ID NO. 152
aattccccttcccctcccctgtcgtcgtctcccctcacccgaagccccgattcgaaaccggcggcgttcgatttggggatttcggcgtctcgctccccggaatttcttggatctgagtctgtccgccgtcttcgatttgcggctgcagtgagcctgcgagttttccggctctgatttggtcggggtcttcgatttcggggatggactcgtctccggtgtcctactggtgctacagctgcagccgcttcgtgagggtatctccgtccaccgtcgtctgcccggagtgcgatggcggcttcctggagcagtttacgcagccgccgccgcgcggcggcggcgggagcggccggcgcgggacgatgaacccggtcatcgtgctccgcggcggatcgctttccgggttcgagctctactacgacgacggcgcgggcgaaggactgcggccgctgcccggtgacgtccagcacctcctcatggggtccggtttccaccgcctgctcgaccagttctcgcggctggaggcggcggctccgcgtccgccggcgtcaaaggctgcggtggaatccatgccgtcggtgacggtggccggaggtggtgcccactgtgccgtgtgccaggaggcctttgagcccggcgccgccggccgggagatgccgtgcaagcacgtctaccaccaggactgcatccttccctggctctcgctccgcaactcctgccccgtctgccgccaagagcttccggccgcagccaccccagatgcggaggcggatgctgggctcaccatatggcgacttccacgcggtggattcgccgtagggaggttcgccggagggcctagagagcagctcccggtcgtctacactgagctggacggcggcttcagtaacggagttgggccgaggcgggtgacgtggccagagggagatggccaagtggatggcggtgaaggtcggattcgccgcctacttaggaatctatttggctgttttggtcatggcagctggccagctagttcatcgcagtcccgtagtggctgagcacagttttccttggtaacaagttttcaattgatagcactgaagaactagggctagtgtaagaatggaacccaaattataatttcttggggcttttgatgtaaatgaaggcctagcattcccccttcctttgtctcatctaagaattattaagagatgtctatgagcaaacatcttggagcgagctttgcaaccaaattaggctaaacacaagtgcaaggcttcaagaaaggaatatcaatggatgttttggggaaataaaaaaaaaaaaaaaa

SEQ ID NO: 152 - protein, 278 aa, Zea mays
  misc_feature: Ceres CLONE ID no. 987194
  misc_feature: Score of 662.6 for HMM of FIGURE 6
  misc_feature (135)..(175): Pfam Name: zf-C3HC4 Pfam Description: Zinc finger, C3HC4 type (RING finger)
  misc_feature (191)..(264): Pfam Name: DUF1117 Pfam Description: Protein of unknown function (DUF1117)
  misc_feature: Functional Homolog of  Ceres CLONE ID no. 21863 at SEQ ID NO. 89
MDSSPVSYWCYSCSRFVRVSPSTVVCPECDGGFLEQFTQPPPRGGGGSGRRGTMNPVIVLRGGSLSGFELYYDDGAGEGLRPLPGDVQHLLMGSGFHRLLDQFSRLEAAAPRPPASKAAVESMPSVTVAGGGAHCAVCQEAFEPGAAGREMPCKHVYHQDCILPWLSLRNSCPVCRQELPAAATPDAEADAGLTIWRLPRGGFAVGRFAGGPREQLPVVYTELDGGFSNGVGPRRVTWPEGDGQVDGGEGRIRRLLRNLFGCFGHGSWPASSSQSRSG

SEQ ID NO: 153 - DNA, 1853 bp, Triticum aestivum
  misc_feature: Ceres CLONE ID no.1780447
  misc_feature: Encodes the peptide sequence at SEQ ID NO. 154
aattcaatcatcgaccaaacaaagggggaatcggaatcggtcgcctcctctcctccccccaccaccaacccttcttcctcttccggtctctctctctctctctctctactagtctctactgccgccgtcgccgccgcccgtccgcttcctctcgcagctcccctgcctcctgcaagcagctgcctttctttccgctcagctccctgctcgcgcggccggccggccggatcggcggcctagcctcggcaagtccccttgctgtgccggcggtttccgcccagatctgagcctctcgcccccccccccccccacaaaggccccgtcttccgcccaaagccgccgcctttcgcgatggcctcgtcccccacggcggcccccggggcgtcctactggtgctaccagtgcgaccgcttcgtccgtgccgcgccgcagcaggagggcggcggcggcgactccccgtccgccgccgtcgcctgcccggcctgcggcggcggcttcctcgaggagatgggcgcgcccccgccgcgggccgcctacctccgccgcccgcgcgcgcaccaccaccacgccgcggcggccgccgacctgcgcctccgccgcgcccgccgcggcgggggcggcggcgccggggccgacacccgcgcctcgcccttcaaccccgtcatcgtgctccgccgctcccctgccggaggggacgcggacgacgtcgccgccgcagccagcagcttcgagctcttctacgacgacggcgcaggctcgggcctccgcccgctccccgagagcatgtccgacttcctcataggctcggggttcgagcgcctcctcgaccagctcgcgcagatcgaggccggcggcctcgcccgcgcgcgcgacaacccgccggcctccaaggccgccgtcgagtccatgcccgtcgtcgccgtcgacgccgcgcgcgtcgccgccgactcccactgcgccgtctgcaaggagcccttcgagctcggcgccgaggcgcgcgagatgccctgcagccacatctaccacgccgactgcatcctgccctggctcgcgctccgcaactcctgcccggtctgccgccacgagatgcccaccgacgcgccgcgcgcaggggcgcgggccgccggcgagggctccgaggaggaggccaccgtcggcctcaccatctggaggctccccggcggcggcttcgcggtcgggaggttcaccggcgggaggaggcccgaggagagggagctccccgtcgtgtacacggagatggacggcggattcaacaacggcggcgcgccaaggaggatctcctgggtgtcaaggcagagcccctccacggagaggggagccatcaggcgcatcctgcgcagcgtcttcgcctgcttcgggcgcggccactcttcttcgcgggcctcgtcctcccaatcacacgcgatgccggagctcaacgatgcggcgtccgaccggagcgccagcttcagccatgggtcaaggagccggagcacgagctggcggctcgaggacggccacgccgatgccatggtgcagagatgaaaacttactgcacaaagcttgttgcttgcttgcttgcttgcttgcttgtttcattcatgtatttacttactgcttagtagtacttagaagaagaagaaacacgaaggatttgtagaacaaagcaatcggcttattggtgatgtacataggagagcagcatctcatctcatctctctagagacgatgtatgatggattgctacttgcaggtgggatggggaattatactgttcaccttaaatggtgatcctgcaatgggcattcggtgaggtgatgaaaatgttctttcaaaaaaaaaaaaaaaaaaaa

SEQ ID NO: 154 - protein, 397 aa, Triticum aestivum
  misc_feature: Ceres CLONE ID no. 1780447
  misc_feature: Score of 962.0 for HMM of FIGURE 6
  misc_feature (202)..(242): Pfam Name: zf-C3HC4 Pfam Description: Zinc finger, C3HC4 type (RING finger)
  misc_feature (267)..(390): Pfam Name: DUF1117 Pfam Description: Protein of unknown function (DUF1117)
  misc_feature: Functional Homolog of  Ceres CLONE ID no. 21863 at SEQ ID NO. 89
MASSPTAAPGASYWCYQCDRFVRAAPQQEGGGGDSPSAAVACPACGGGFLEEMGAPPPRAAYLRRPRAHHHHAAAAADLRLRRARRGGGGGAGADTRASPFNPVIVLRRSPAGGDADDVAAAASSFELFYDDGAGSGLRPLPESMSDFLIGSGFERLLDQLAQIEAGGLARARDNPPASKAAVESMPVVAVDAARVAADSHCAVCKEPFELGAEAREMPCSHIYHADCILPWLALRNSCPVCRHEMPTDAPRAGARAAGEGSEEEATVGLTIWRLPGGGFAVGRFTGGRRPEERELPVVYTEMDGGFNNGGAPRRISWVSRQSPSTERGAIRRILRSVFACFGRGHSSSRASSSQSHAMPELNDAASDRSASFSHGSRSRSTSWRLEDGHADAMVQR

SEQ ID NO: 155 - DNA, 1193 bp, Triticum aestivum
  misc_feature: Ceres CLONE ID no.677852
  misc_feature: Encodes the peptide sequence at SEQ ID NO. 156
aattcccctcccctctccaggtctcctcccgaaacccccaattcgaaaatcgatttggggatttcggcgtcccagatccgctcctccggccggttcgctcggccgcacgtccgatccgcgttcgcggccgccgtcggagctgctgaccggcccgcggctcgattcgtccgggggatttgttgcgggggctctcgcttgctcccgatggcgtcgtccccggtctcctactggtgctaccactgcagccgcttcgtgcgggtctccccggccaccgtcgtctgccccgactgcgacggcggcttcctcgagcagttcccgcagcctccgccgccgcgcggcggcggcggcagcggccggcgcggggccatgaacccggtgatcgtgctgcggggcggctcgctctccggcttcgagctctactacgaggacggctccggcgacgggctgcggccgctgcccggcgacgtctcgcacctcctcatggggtcggggttccaccgcctgctcgaccagttctcgaggctggaggctgccgccccgcgcccgccggcgtccaaggccgcggtggagtcgatgccgtccgtgacggtcgccgggggaggcggggcccactgcgcggtgtgccaggaggccttcgagcccggcgccgcggctcgggagatgccgtgcaagcacgtctaccaccaggactgcatcctcccctggctctccctccgcaactcctgccccatctgccgcagcgagcttccggcggcagccgtgcctgaggcggaggcggatgccgggctcaccatctggcgactcccccgcggcggattcgccgttggaaggttcgccggcgggcccagagagcaactgccggttgtctacacggagctggatggtggtttcagcaacggcgtcgggccgaggcgggtgacatggccagaaggagaagggcaggtggacggcggcgaaggtcggattcgccgtgtatttaggaacctgtttgggtgctttggccggggcggccggcctgagagttcctcgcagtcccgtagtggctgagcaatgttcttcctggtaactcactttcaattgatgatagtggtgaataagtaggagttagtataaggaggaaaccccaggtggtgagttattggttagtttgatgtaaatgaagggcttgcattccccaccttttgtctcgtttt

SEQ ID NO: 156 - protein, 280 aa, Triticum aestivum
  misc_feature: Ceres CLONE ID no. 677852
  misc_feature: Score of 664.0 for HMM of FIGURE 6
  misc_feature (137)..(177): Pfam Name: zf-C3HC4 Pfam Description: Zinc finger, C3HC4 type (RING finger)
  misc_feature (193)..(267): Pfam Name: DUF1117 Pfam Description: Protein of unknown function (DUF1117)
  misc_feature: Functional Homolog of  Ceres CLONE ID no. 21863 at SEQ ID NO. 89
MASSPVSYWCYHCSRFVRVSPATVVCPDCDGGFLEQFPQPPPPRGGGGSGRRGAMNPVIVLRGGSLSGFELYYEDGSGDGLRPLPGDVSHLLMGSGFHRLLDQFSRLEAAAPRPPASKAAVESMPSVTVAGGGGAHCAVCQEAFEPGAAAREMPCKHVYHQDCILPWLSLRNSCPICRSELPAAAVPEAEADAGLTIWRLPRGGFAVGRFAGGPREQLPVVYTELDGGFSNGVGPRRVTWPEGEGQVDGGEGRIRRVFRNLFGCFGRGGRPESSSQSRSG

SEQ ID NO: 157 - protein, 279 aa, Oryza sativa subsp. japonica
  misc_feature: Public GI no. 115452185
  misc_feature: Score of 669.5 for HMM of FIGURE 6
  misc_feature (135)..(175): Pfam Name: zf-C3HC4 Pfam Description: Zinc finger, C3HC4 type (RING finger)
  misc_feature (191)..(275): Pfam Name: DUF1117 Pfam Description: Protein of unknown function (DUF1117)
  misc_feature: Functional Homolog of  Ceres CLONE ID no. 21863 at SEQ ID NO. 89
MASSPVSYWCYHCSRFVRVSPSTVVCPECDGGFLEQFPQPPPRGGGGSGRRGAMNPVIVLRGGSLSGFELYYDDGSGDGLRPLPGDVSHLLMGSGFHRLLDQFSRLEAAAPRPPASKAAVESMPSVTVAGSGAHCAVCQEAFEPGASAREMPCKHVYHQDCILPWLSLRNSCPVCRRELPAAAAPESEADAGLTIWRLPRGGFAVGRFAGGPREQLPVVYTELDGGFSNGVGPRRVTWPEGDGHVDGGEGRIRRVFRNLFGCFGRSSRPESSSSQSRSG

SEQ ID NO: 158 - DNA, 1803 bp, Artificial Sequence; identical to SEQ ID NO: 132
  misc_feature: Truncated Version Of Ceres CLONE ID no.1918241
  misc_feature: Encodes the peptide sequence at SEQ ID NO. 159

SEQ ID NO: 159 - protein, 235 aa, Artificial Sequence
  misc_feature: Truncated Version Of Ceres CLONE ID no. 1918241
  misc_feature: Score of 526.2 for HMM of FIGURE 5
  misc_feature (190)..(230): Pfam Name: zf-C3HC4 Pfam Description: Zinc finger, C3HC4 type (RING finger)
  misc_feature: Functional Homolog of  Ceres CLONE ID no. 21863 at SEQ ID NO. 89
MESIRSPYWCYRCNRFIRIRVRSPHDSLNCPDCGGGFIEEIETPSRSPIHHRFPAAAMYSDTPSPALSPSPTATPHFRRTRRNAGDRSPFNPVVVLRGPTSESEGIVTERGNRNFELYYDDGSGSGLRPLPASMSEFLMGSGFDRLLDQLSQLEANGVGRFEQPPASKAAIESMPVIKILGSHVRSESHCAVCKEPFELDSEAREMPCKHIYHSDCILPWLSIRNSCPVCRHELP

SEQ ID NO: 160 - DNA, 936 bp, Artificial Sequence; identical to SEQ ID NO: 142
  misc_feature: Truncated Version Of Ceres ANNOT ID no.1454043
  misc_feature: Encodes the peptide sequence at SEQ ID NO. 161

SEQ ID NO: 161 - protein, 204 aa, Artificial Sequence
  misc_feature: Truncated Version Of Ceres ANNOT ID no. 1454043
  misc_feature: Score of 491.6 for HMM of FIGURE 5
  misc_feature (158)..(198): Pfam Name: zf-C3HC4 Pfam Description: Zinc finger, C3HC4 type (RING finger)
  misc_feature: Functional Homolog of  Ceres CLONE ID no. 21863 at SEQ ID NO. 89
MASSIESSFWCYRCNRSIRLPTQDSILCPDCGGGFIEEIGITRPHHRLTAAHRTRLRTGGDHSPFNPVIILRGATTDLASGNFELYYDDGAASGLRPLPASISELLMDSGFERLLDQLTQMEINGVGRFDHPQASKAAIESMPVIKILNSHVSMESQCAVCKEAFEINTEAREMPCNHIYHSDCILPWLSIRNSCPVCRHELPT

SEQ ID NO: 162 - DNA, 1513 bp, Artificial Sequence; identical to SEQ ID NO: 134
  misc_feature: Truncated Version Of Ceres CLONE ID no.1938564
  misc_feature: Encodes the peptide sequence at SEQ ID NO. 163

SEQ ID NO: 163 - protein, 234 aa, Artificial Sequence
  misc_feature: Truncated Version Of Ceres CLONE ID no. 1938564
  misc_feature: Score of 468.5 for HMM of FIGURE 5
  misc_feature (188)..(228): Pfam Name: zf-C3HC4 Pfam Description: Zinc finger, C3HC4 type (RING finger)
  misc_feature: Functional Homolog of  Ceres CLONE ID no. 21863 at SEQ ID NO. 89
MESITSPYWCYRCNRFIRVRIRSPHDSVHCLHCGGGFIEEIQTPSRSPIDHRFPVASLYSGTPSLSPSPTATHRFRRARRNAGDRSPFYPVVVLRGPSSETDGELPERGNTSFELYYDDGSGSGLRHLPDSMSEFLMGSDFDRLLDQLSQLQVNEVGRFEQPPASKAAIESMPVIRIVGRHIRSDSHCAVCKEPFELDSEAREMPCKHIYHSDCIVPWLSIRNSCPVCRHELPI

SEQ ID NO: 164 - DNA, 1212 bp, Artificial Sequence; identical to SEQ ID NO: 136
  misc_feature: Truncated Version Of Ceres ANNOT ID no.1464854
  misc_feature: Encodes the peptide sequence at SEQ ID NO. 165

SEQ ID NO: 165 - protein, 245 aa, Artificial Sequence
  misc_feature: Truncated Version Of Ceres ANNOT ID no. 1464854
  misc_feature: Score of 544.2 for HMM of FIGURE 5
  misc_feature (199)..(239): Pfam Name: zf-C3HC4 Pfam Description: Zinc finger, C3HC4 type (RING finger)
  misc_feature: Functional Homolog of  Ceres CLONE ID no. 21863 at SEQ ID NO. 89
MSSPTTPSYWCYRCNRFVQVWRQDSVTCPECESGFIEEIENPPHMIQTEASRERHRRLSPAAGTMFMIGNRSNPHRRNRRGGAAGSGDRSPINPVIVLRGGPGGAAEDVVGDDGGRGGGGFELYYDDGGGSGLRPLPPSMSEFLLGSGFERLLDQLTHIEMNGGFGRYENQHPPASKSAIESMPTVIINESHTFTESHCAVCKEAFELESEAREMPCKHIYHTDCILPWLSIRNSCPVCRHELPS

SEQ ID NO: 166 - DNA, 1359 bp, Artificial Sequence; identical to SEQ ID NO: 138
  misc_feature: Truncated Version Of Ceres ANNOT ID no.1511378
  misc_feature: Encodes the peptide sequence at SEQ ID NO. 167

SEQ ID NO: 167 - protein, 245 aa, Artificial Sequence
  misc_feature: Truncated Version Of Ceres ANNOT ID no. 1511378
  misc_feature: Score of 521.1 for HMM of FIGURE 5
  misc_feature (199)..(239): Pfam Name: zf-C3HC4 Pfam Description: Zinc finger, C3HC4 type (RING finger)
  misc_feature: Functional Homolog of  Ceres CLONE ID no. 21863 at SEQ ID NO. 89
MSSPTTPSFWCYGCSRFVQVWRQDSLTCAECESGFIEEIENPPHVIQTEISSDRHRRFSPAAGTMFMIGNRSNPHNRNRRGGGAGSGDRSPMNPVILLRGGAGGAADDVVGDDGGRGGGGFELYYDDGGGSGLRPLPPSMSEFLLGSGFERLLDQLAQIEINGGFGRYENQHPPASKSAIESMPTVIVNESHIFTESHCAVCKEAFELESEAREMPCKHIYHTDCILPWLSIRNSCPVCRRELPS

SEQ ID NO: 168 - DNA, 1425 bp, Artificial Sequence; identical to SEQ ID NO: 140
  misc_feature: Truncated Version Of Ceres ANNOT ID no.1458137
  misc_feature: Encodes the peptide sequence at SEQ ID NO. 169

SEQ ID NO: 169 - protein, 245 aa, Artificial Sequence; identical to SEQ ID NO: 167
  misc_feature: Truncated Version Of Ceres ANNOT ID no. 1458137
  misc_feature: Score of 521.1 for HMM of FIGURE 5
  misc_feature (199)..(239): Pfam Name: zf-C3HC4 Pfam Description: Zinc finger, C3HC4 type (RING finger)
  misc_feature: Functional Homolog of  Ceres CLONE ID no. 21863 at SEQ ID NO. 89

SEQ ID NO: 170 - protein, 245 aa, Artificial Sequence
  misc_feature: Truncated Version Of Public GI no. 18424254
  misc_feature: Score of 525.0 for HMM of FIGURE 5
  misc_feature (199)..(239): Pfam Name: zf-C3HC4 Pfam Description: Zinc finger, C3HC4 type (RING finger)
  misc_feature: Functional Homolog of  Ceres CLONE ID no. 21863 at SEQ ID NO. 89
MPSTPTTPTTTTPITASYWCYSCTRFVSVWADQGTTTVGSVACPHCDGGFIEQINDSSSAATELTIPASTEVRSINNNRRSVIRRRRSGRRPSFNPVIVLQGGAGEREEGEEGDAARDRRAFEFYYDDGSGSGLRPLPDSVSEILMGSGFERLLEQLSQIEASATGIGRSGNPPASKSAIESLPRVEISDCHIGSEANCAVCTEIFETETEAREMPCKHLFHDDCIVPWLSIRNSCPVCRFELPS

SEQ ID NO: 171 - DNA, 1323 bp, Artificial Sequence; identical to SEQ ID NO: 145
  misc_feature: Truncated Version Of Ceres CLONE ID no.479514
  misc_feature: Encodes the peptide sequence at SEQ ID NO. 172

SEQ ID NO: 172 - protein, 230 aa, Artificial Sequence
  misc_feature: Truncated Version Of Ceres CLONE ID no. 479514
  misc_feature: Score of 543.7 for HMM of FIGURE 5
  misc_feature (184)..(224): Pfam Name: zf-C3HC4 Pfam Description: Zinc finger, C3HC4 type (RING finger)
  misc_feature: Functional Homolog of  Ceres CLONE ID no. 21863 at SEQ ID NO. 89
MNLETQPGTASYWCYSCTRFVHLSVQSTIACPHCQSGFVEEIRAGAGAEASPRHRLSPFPDDPLLLRRQGFRRRRREASGNRSPFNPVIVLRGPGDDSAAADHDGVSTFELFYDDGDGTGLRPLPPTMSELLLGSGFDKLLEQFAQIEMNGFGRPENPPASKAAIESMPTVEIGETHVETEAHCAVCKEAFELHAEARELPCKHIYHSDCILPWLSMRNSCPVCRHELPS

SEQ ID NO: 173 - DNA, 1204 bp, Artificial Sequence; identical to SEQ ID NO: 147
  misc_feature: Truncated Version Of Ceres CLONE ID no.1240790
  misc_feature: Encodes the peptide sequence at SEQ ID NO. 174

SEQ ID NO: 174 - protein, 199 aa, Artificial Sequence
  misc_feature: Truncated Version Of Ceres CLONE ID no. 1240790
  misc_feature: Score of 437.9 for HMM of FIGURE 5
  misc_feature (153)..(193): Pfam Name: zf-C3HC4 Pfam Description: Zinc finger, C3HC4 type (RING finger)
  misc_feature: Functional Homolog of  Ceres CLONE ID no. 21863 at SEQ ID NO. 89
MNSDTTSYWCYSCTRFVHIQEQNDVVCPRCHGGFVEKVTAPQSSRQGFRRRRRNAGNHSAFNPVIVLRGPGEDEESSFELYYDGFDGEGLRPLPSTMSEFLLGSGFDRLLEQVSQIEINGLGRAENPPASKAAIESMPTVEITESHVASETICAVCKEAFELGALAREMPCKHLYHSDCILPWLSMRNSCPVCRHELPS

SEQ ID NO: 175 - DNA, 1779 bp, Artificial Sequence; identical to SEQ ID NO: 149
  misc_feature: Truncated Version Of Ceres CLONE ID no.942216
  misc_feature: Encodes the peptide sequence at SEQ ID NO. 176

SEQ ID NO: 176 - protein, 245 aa, Artificial Sequence
  misc_feature: Truncated Version Of Ceres CLONE ID no. 942216
  misc_feature: Score of 426.4 for HMM of FIGURE 5
  misc_feature (199)..(239): Pfam Name: zf-C3HC4 Pfam Description: Zinc finger, C3HC4 type (RING finger)
  misc_feature: Functional Homolog of  Ceres CLONE ID no. 21863 at SEQ ID NO. 89
MDRWAATAAGPAAAGAAGTPSYWCYSCERFVRTAGDAGLVCPGCDGGFLEQMDAPPPRRAVAPSAFLRRRAAEAPTEVRPRRGRRGGASGDRSGSPYNPVIVLRRSAAPPGDEAPGATSSFELFYDDGAGSGLRPLPESMSDFLMGSGFERLLEQLAQIEAGGFGAVRPCDNPPASKAAVESMPTVVVAACHVGADSHCAVCKEAFQLGDEAREMPCSHMYHQDCILPWLALRNSCPVCRHELPT

SEQ ID NO: 177 - DNA, 1312 bp, Artificial Sequence; identical to SEQ ID NO: 151
  misc_feature: Truncated Version Of Ceres CLONE ID no.987194
  misc_feature: Encodes the peptide sequence at SEQ ID NO. 178

SEQ ID NO: 178 - protein, 181 aa, Artificial Sequence
  misc_feature: Truncated Version Of Ceres CLONE ID no. 987194
  misc_feature: Score of 406.4 for HMM of FIGURE 5
  misc_feature (135)..(175): Pfam Name: zf-C3HC4 Pfam Description: Zinc finger, C3HC4 type (RING finger)
  misc_feature: Functional Homolog of  Ceres CLONE ID no. 21863 at SEQ ID NO. 89
MDSSPVSYWCYSCSRFVRVSPSTVVCPECDGGFLEQFTQPPPRGGGGSGRRGTMNPVIVLRGGSLSGFELYYDDGAGEGLRPLPGDVQHLLMGSGFHRLLDQFSRLEAAAPRPPASKAAVESMPSVTVAGGGAHCAVCQEAFEPGAAGREMPCKHVYHQDCILPWLSLRNSCPVCRQELPA

SEQ ID NO: 179 - DNA, 1853 bp, Artificial Sequence; identical to SEQ ID NO: 153
  misc_feature: Truncated Version Of Ceres CLONE ID no.1780447
  misc_feature: Encodes the peptide sequence at SEQ ID NO. 180

SEQ ID NO: 180 - protein, 248 aa, Artificial Sequence
  misc_feature: Truncated Version Of Ceres CLONE ID no. 1780447
  misc_feature: Score of 522.7 for HMM of FIGURE 5
  misc_feature (202)..(242): Pfam Name: zf-C3HC4 Pfam Description: Zinc finger, C3HC4 type (RING finger)
  misc_feature: Functional Homolog of  Ceres CLONE ID no. 21863 at SEQ ID NO. 89
MASSPTAAPGASYWCYQCDRFVRAAPQQEGGGGDSPSAAVACPACGGGFLEEMGAPPPRAAYLRRPRAHHHHAAAAADLRLRRARRGGGGGAGADTRASPFNPVIVLRRSPAGGDADDVAAAASSFELFYDDGAGSGLRPLPESMSDFLIGSGFERLLDQLAQIEAGGLARARDNPPASKAAVESMPVVAVDAARVAADSHCAVCKEPFELGAEAREMPCSHIYHADCILPWLALRNSCPVCRHEMPT

SEQ ID NO: 181 - DNA, 1193 bp, Artificial Sequence; identical to SEQ ID NO: 155
  misc_feature: Truncated Version Of Ceres CLONE ID no.677852
  misc_feature: Encodes the peptide sequence at SEQ ID NO. 182

SEQ ID NO: 182 - protein, 183 aa, Artificial Sequence
  misc_feature: Truncated Version Of Ceres CLONE ID no. 677852
  misc_feature: Score of 406.4 for HMM of FIGURE 5
  misc_feature (137)..(177): Pfam Name: zf-C3HC4 Pfam Description: Zinc finger, C3HC4 type (RING finger)
  misc_feature: Functional Homolog of  Ceres CLONE ID no. 21863 at SEQ ID NO. 89
MASSPVSYWCYHCSRFVRVSPATVVCPDCDGGFLEQFPQPPPPRGGGGSGRRGAMNPVIVLRGGSLSGFELYYEDGSGDGLRPLPGDVSHLLMGSGFHRLLDQFSRLEAAAPRPPASKAAVESMPSVTVAGGGGAHCAVCQEAFEPGAAAREMPCKHVYHQDCILPWLSLRNSCPICRSELPA

SEQ ID NO: 183 - protein, 181 aa, Artificial Sequence
  misc_feature: Truncated Version Of Public GI no. 115452185
  misc_feature: Score of 409.9 for HMM of FIGURE 5
  misc_feature (135)..(175): Pfam Name: zf-C3HC4 Pfam Description: Zinc finger, C3HC4 type (RING finger)
  misc_feature: Functional Homolog of  Ceres CLONE ID no. 21863 at SEQ ID NO. 89
MASSPVSYWCYHCSRFVRVSPSTVVCPECDGGFLEQFPQPPPRGGGGSGRRGAMNPVIVLRGGSLSGFELYYDDGSGDGLRPLPGDVSHLLMGSGFHRLLDQFSRLEAAAPRPPASKAAVESMPSVTVAGSGAHCAVCQEAFEPGASAREMPCKHVYHQDCILPWLSLRNSCPVCRRELPA

SEQ ID NO: 184 - DNA, 954 bp, Populus balsamifera subsp. trichocarpa
  misc_feature: Ceres ANNOT ID no.1534144
  misc_feature: Encodes the peptide sequence at SEQ ID NO. 185
atggcacaattacctccgaaaataccaaacaatatgacaccgagttggcctgatttctctcataagaagtcaccttccatttgtattatggggacatcgccaccccacgatgctaatgcggtcattcctaccgttaccgctaacaccaccgctactgtcgcatcgcaaaacccttcgtgggttgatgaattcctcgacttctcgttgacgagacgtgggacgcaccggaggtcagtgagtgactccattgcattcctagaagaagcaccgacaatgctagaggaatgtcgttccacgggtgcaccgggattagggtcacggcattacagtagcagtgactttgacagatttgatgatgaacagtttatgtccatgtttaacgatggtatctcaaatgctgtggcagctcctaattcaagctccacaccttcttcgccgtctgatcataacagcattaatgacgagagagaagctacactgtctgagcaacagcaacagcagaaagtgagggatgagaatgatgaagggcaaaatctatctgaatgggagacaccaagtaccgtcccaagcgcaaccaatcctgctattacttctaatgaaaacaaaattgatcccaagagagttaagagaatcttggcaaacagacaatctgctcaaagatcacgagtgaggaaactgcagtacatatctgagcttgaacgtagtgtaacatcattgcaagctgaagtttctgtgttatcaccaagggttgcatatctagaccatcaaaggttgcttctaaatgttgacaacagtgctcttaagcaaagaatcgctgcactgtctcaagataagattttcaaagatgctcatcaagaagcattaaggacggaaatagagagactgaggcaagtttatcagcaacaaaacctcaagatggataaaacgaacagcagcatcaaccagaacaaatga

SEQ ID NO: 185 - protein, 317 aa, Populus balsamifera subsp. trichocarpa
  misc_feature: Ceres ANNOT ID no. 1534144
  misc_feature: Score of 671.3 for HMM of FIGURE 1
  misc_feature (202)..(256): Pfam Name: bZIP_2 Pfam Description: Basic region leucine zipper
  misc_feature: Functional Homolog of  Ceres CLONE ID no. 34553 at SEQ ID NO. 80
MAQLPPKIPNNMTPSWPDFSHKKSPSICIMGTSPPHDANAVIPTVTANTTATVASQNPSWVDEFLDFSLTRRGTHRRSVSDSIAFLEEAPTMLEECRSTGAPGLGSRHYSSSDFDRFDDEQFMSMFNDGISNAVAAPNSSSTPSSPSDHNSINDEREATLSEQQQQQKVRDENDEGQNLSEWETPSTVPSATNPAITSNENKIDPKRVKRILANRQSAQRSRVRKLQYISELERSVTSLQAEVSVLSPRVAYLDHQRLLLNVDNSALKQRIAALSQDKIFKDAHQEALRTEIERLRQVYQQQNLKMDKTNSSINQNK

SEQ ID NO: 186 - DNA, 993 bp, Populus balsamifera subsp. trichocarpa
  misc_feature: Ceres ANNOT ID no.1441679
  misc_feature: Encodes the peptide sequence at SEQ ID NO. 187
atggctcaattgccacccaaaattcctgctgtcacccaaaattggccttccttttctcaccaaacaatgtccaattatttctcaaacgctgccgccaccatggagaaccatcaaccctgttgggttgatgagttcttggacttcacgtccaccagacgcgggtcccaccgccggtctattagcgactgcatcactttcatcgagacgaccaacatgccctccttggtggaagatcaatgccacgacaacaacaacagcagcagctgcaataataaccattcctcttccaatgccttgatttccgctaatcttgggttcgacaagttggatgatgaccagctcatgtccatgttttcccatgacatgtccttgtctttgccaccatcctcctccaacccctccaccccgtccgaccaaaatagcaaaaacgatgagaaaccatcaaagccaacagatcaacatcaccatcaagaagaaggaaataccgagcagcaacaagcagcggtggccaagaccgagccaggagaggtggagagttcatgcaagcaagaaccacaccagcctcctcttcccacatcttcaaataatggtgataccatcaatgacccgaagagggtgaaaagaattttggcaaatcggcaatctgcacaaaggtcaagagtgaggaaattgcaatacatttcagagcttgaacgtagcgtgacaacattacagacggaagtatcagcattgtcgccaagagttgcatttttagaccatcaacggctgattctcaacgttgataatagtgccctcaagcaacggattgccgctttggctcaagacaagattttcaaagatgcccatcaagaggcattgaagaaggaaatagagagactcaggcaggtctatcaccaccaaaatctcaagaagatgaacagcagcggccatgcagcagaagcagcaagagagcaatcgccaaaccacgaagcaattcagtgttcggaaaattaa

SEQ ID NO: 187 - protein, 330 aa, Populus balsamifera subsp. trichocarpa
  misc_feature: Ceres ANNOT ID no. 1441679
  misc_feature: Score of 498.9 for HMM of FIGURE 1
  misc_feature (200)..(254): Pfam Name: bZIP_2 Pfam Description: Basic region leucine zipper
  misc_feature: Functional Homolog of  Ceres CLONE ID no. 34553 at SEQ ID NO. 80
MAQLPPKIPAVTQNWPSFSHQTMSNYFSNAAATMENHQPCWVDEFLDFTSTRRGSHRRSISDCITFIETTNMPSLVEDQCHDNNNSSSCNNNHSSSNALISANLGFDKLDDDQLMSMFSHDMSLSLPPSSSNPSTPSDQNSKNDEKPSKPTDQHHHQEEGNTEQQQAAVAKTEPGEVESSCKQEPHQPPLPTSSNNGDTINDPKRVKRILANRQSAQRSRVRKLQYISELERSVTTLQTEVSALSPRVAFLDHQRLILNVDNSALKQRIAALAQDKIFKDAHQEALKKEIERLRQVYHHQNLKKMNSSGHAAEAAREQSPNHEAIQCSEN

SEQ ID NO: 188 - DNA, 855 bp, Populus balsamifera subsp. trichocarpa
  misc_feature: Ceres ANNOT ID no.1480659
  misc_feature: Encodes the peptide sequence at SEQ ID NO. 189
atggcacaattacctccgaaaataccaaacaatatgacaccgagttggcctgatttctctcataagaagtcaccttccatttgtattatggggacatcgccaccccacgatgctaatgcggtcattcctaccgttaccgctaacaccaccgctactgtcgcatcgcaaaacccttcgtgggttgatgaattcctcgacttctcgttgacgagacgtgggacgcaccggaggtcagtgagtgactccattgcattcctagaagaagcaccgacaatgctagaggaatgtcgttccacgggtgcaccgggattagggtcacggcattacagtagcagtgactttgacagatttgatgatgaacagtttatgtccatgtttaacgatggtatctcaaatgctgtggcagctcctaattcaagctccacaccttcttcgccgtctgatcataacagcattaatgacgagagagaagctacactgtctgagcaacagcaacagcagaaagtgagggatgagaatgatgaagggcaaaatctatctgaatgggagacaccaagtaccgtcccaagcgcaaccaatcctgctattacttctaatgaaaacaaaattgatcccaagagagttaagagaatcttggcaaacagacaatctgctcaaagatcacgagtgaggaaactgcagtacatatctgagcttgaacgtagtgtaacatcattgcaagctgaagtttctgtgttatcaccaagggttgcatatctagaccatcaaaggttgcttctaaatgttgacaacagtgctcttaagcaaagaatcgctgcactgtctcaagataagattttcaaagatggtaattaa

SEQ ID NO: 189 - protein, 284 aa, Populus balsamifera subsp. trichocarpa
  misc_feature: Ceres ANNOT ID no. 1480659
  misc_feature: Score of 535.4 for HMM of FIGURE 1
  misc_feature (202)..(256): Pfam Name: bZIP_2 Pfam Description: Basic region leucine zipper
  misc_feature: Functional Homolog of  Ceres CLONE ID no. 34553 at SEQ ID NO. 80
MAQLPPKIPNNMTPSWPDFSHKKSPSICIMGTSPPHDANAVIPTVTANTTATVASQNPSWVDEFLDFSLTRRGTHRRSVSDSIAFLEEAPTMLEECRSTGAPGLGSRHYSSSDFDRFDDEQFMSMFNDGISNAVAAPNSSSTPSSPSDHNSINDEREATLSEQQQQQKVRDENDEGQNLSEWETPSTVPSATNPAITSNENKIDPKRVKRILANRQSAQRSRVRKLQYISELERSVTSLQAEVSVLSPRVAYLDHQRLLLNVDNSALKQRIAALSQDKIFKDGN

SEQ ID NO: 190 - DNA, 939 bp, Populus balsamifera subsp. trichocarpa
  misc_feature: Ceres ANNOT ID no.1479838
  misc_feature: Encodes the peptide sequence at SEQ ID NO. 191
atggcacaattacctccaaaaataccaaacgtgacaccaagttggcccgatttttctcataaaaaattaccaataattggcattatggagacatcaccaccccgtgatgctaatatcatcaccgccattgttacaaacccttcgtgggttgacgaatttctcggcttctcgtcgacgagacgtgggacacataggaggtcggtgagtgactccattgcattccgggaagaagcaccaacgatgttagagaaatgtcgtgccacgggtgcaccgggattagggtcgggacataacagcagcactgactttgacaagtttgatgatgaacagcttatgtccatgtttaacgatgatatctccaatgccgtggcagctcctaattctagctccacaccttcttcgccgtctgatcacaacagcattaatgatgagaaagaagctatagtagtggcgtctaagcataagcagcagcagaaggtgaggaatgagaatgatgaagggcaaagtccatctgaatgggagacaccgactactgtcccaactgccaccgatcctgctgctacttctaatgaacggaaaatcgatcccaggagagttaagagaatcttggcaaacagacaatctgctcaaagatcacgggtgagaaagctgcagtacatatctgagcttgaacgctgtgtaacatcattgcaaggtgaagtttcagtgttgtcaccaagggttgcatatctagaccatcgaaggttgcttctaaatgttgacaacagtgctcttaagcaaagaatcgctgcactggctcaagataagattttcaaagatggcaactcatcaagaagcattgaagagggaaatagagaggctaaggcaagtgtatcatcaacagaacctcaagatggaaaatacttcaccaccatcagcatcatcaaccccatcaaatga

SEQ ID NO: 191 - protein, 312 aa, Populus balsamifera subsp. trichocarpa
  misc_feature: Ceres ANNOT ID no. 1479838
  misc_feature: Score of 481.2 for HMM of FIGURE 1
  misc_feature (193)..(247): Pfam Name: bZIP_2 Pfam Description: Basic region leucine zipper
  misc_feature: Functional Homolog of  Ceres CLONE ID no. 34553 at SEQ ID NO. 80
MAQLPPKIPNVTPSWPDFSHKKLPIIGIMETSPPRDANIITAIVTNPSWVDEFLGFSSTRRGTHRRSVSDSIAFREEAPTMLEKCRATGAPGLGSGHNSSTDFDKFDDEQLMSMFNDDISNAVAAPNSSSTPSSPSDHNSINDEKEAIVVASKHKQQQKVRNENDEGQSPSEWETPTTVPTATDPAATSNERKIDPRRVKRILANRQSAQRSRVRKLQYISELERCVTSLQGEVSVLSPRVAYLDHRRLLLNVDNSALKQRIAALAQDKIFKDGNSSRSIEEGNREAKASVSSTEPQDGKYFTTISIINPIK

SEQ ID NO: 192 - DNA, 786 bp, Populus balsamifera subsp. trichocarpa
  misc_feature: Ceres ANNOT ID no.1533308
  misc_feature: Encodes the peptide sequence at SEQ ID NO. 193
atggcacaattacctccaaaaataccaaacgtgacaccaagttggcccgatttttctcataaaaaattaccaataattggcattatggagacatcaccaccccgtgatgctaatatcatcaccgccattgttacaaacccttcgtgggttgacgaatttctcggcttctcgtcgacgagacgtgggacacataggaggtcggtgagtgactccattgcattccgggaagaagcaccaacgatgttagagaaatgtcgtgccacgggtgcaccgggattagggtcgggacataacagcagcactgactttgacaagtttgatgatgaacagcttatgtccatgtttaacgatgatatctccaatgccgtggcagctcctaattctagctccacaccttcttcgccgtctgatcacaacagcattaatgatgagaaagaagctatagtagtggcgtctaagcataagcagcagcagaaggtgaggaatgagaatgatgaagggcaaagtccatctgaatgggagacaccgactactgtcccaactgccaccgatcctgctgctacttctaatgaacggaaaatcgatcccaggagagttaagagaatcttggcaaacagacaatctgctcaaagatcacgggtgagaaagctgcagtacatatctgagcttgaacgctgtgtaacatcattgcaagtaagtaatttccagttaaccttaactaattctcttacaagcatcataattatgctaatcttgcatggtttgaaatgtaataataagttttaa

SEQ ID NO: 193 - protein, 261 aa, Populus balsamifera subsp. trichocarpa
  misc_feature: Ceres ANNOT ID no. 1533308
  misc_feature: Score of 299.8 for HMM of FIGURE 1
  misc_feature (193)..(237): Pfam Name: bZIP_2 Pfam Description: Basic region leucine zipper
  misc_feature: Functional Homolog of  Ceres CLONE ID no. 34553 at SEQ ID NO. 80
MAQLPPKIPNVTPSWPDFSHKKLPIIGIMETSPPRDANIITAIVTNPSWVDEFLGFSSTRRGTHRRSVSDSIAFREEAPTMLEKCRATGAPGLGSGHNSSTDFDKFDDEQLMSMFNDDISNAVAAPNSSSTPSSPSDHNSINDEKEAIVVASKHKQQQKVRNENDEGQSPSEWETPTTVPTATDPAATSNERKIDPRRVKRILANRQSAQRSRVRKLQYISELERCVTSLQVSNFQLTLTNSLTSIIIMLILHGLKCNNKF

SEQ ID NO: 194 - DNA, 1467 bp, Glycine max
  misc_feature: Ceres CLONE ID no.463380
  misc_feature: Encodes the peptide sequence at SEQ ID NO. 195
ggctcatttggtttaatttgcctatgtcatatcatatgtactccttttttcatttcctctctcatttttggagtatttgatttgatgtgcatatatatacacacacattacaggtatatatatgcttagataatcaaaaaatatataccaagttttgtgtttggtttatatatatagttctctctttctctctctttcattcttattcttcttcttcatcttcatcttttcatcttcttgttagagtgtgttgattaattggtgtgactcaaaaaatggctcaattgccaccaaaaattccaaacatgacacccaattggccagacttttcttctcttcaccaaaagatgccttccctccaaaccacgtcatcaaaccaaaacccttcatgggtggatgagattcttgagttctcagtggcgaggcgcggggccccccggcggtcggtgagcgactccgtcactttcctggaggcaccattgctggaccaccatcattgcaaaggtggcagtgttgttggtggtggcggcggcaacaacgagttcgagaggttcgatgatgaacaattcatgtccatgtttagtgatgaagcttcagggaacaataacaataataataccatgatggcacacacgttgtcctcctccaacccttctacaccctctgatcacaacagcatcaatgatgagaaggaaatggaaaataaggaagaggaagagaagaagcaattgaagaatgaatcggaggatgaggataaaagccaatgcaaacaagaaatcacacaacttcccaacaatgatgacagtaataatactagtaatgcaaatgcaacatgttccagtgaaaaaatcacagaccccaagagggtcaaaagaatcttggcaaataggcaatctgcgcaaagatcaagagtgaggaagctgcaatacatatctgagcttgagcgaagtgtgacttcattacaggccgaagtttcagtgttgtctccacgggttgcatttttggatcatcaacgtttgcttctgaatgtcgacaacagtgctttgaagcaaagaatcgccgcgctggcccaagacaagattttcaaagatgcacatcaagaagcactgaagagggagatagagagactgaggcaagtttatcaccaacaaaacataaagaagatggacaataatgctgcagcgtcaccaccatcccagtccccatctccatcaccaaaaccacgatgtgaaactcacactgaaaaggaacagcttatcaatgtttgaagtttgattttgaaccctccctttgaagactcactcaccctttatagactatgatcaaacatatcaaccacccagtgtaagctagtttagatgatctgtgattcttttcaatttttcaaaagaaattgcagaatgttgaaaatgggagaaaaggcaaaaagaaaatgtaaacaacttaaatgcatttatagatgttttc

SEQ ID NO: 195 - protein, 330 aa, Glycine max
  misc_feature: Ceres CLONE ID no. 463380
  misc_feature: Score of 713.7 for HMM of FIGURE 1
  misc_feature (192)..(246): Pfam Name: bZIP_2 Pfam Description: Basic region leucine zipper
  misc_feature: Functional Homolog of  Ceres CLONE ID no. 34553 at SEQ ID NO. 80
MAQLPPKIPNMTPNWPDFSSLHQKMPSLQTTSSNQNPSWVDEILEFSVARRGAPRRSVSDSVTFLEAPLLDHHHCKGGSVVGGGGGNNEFERFDDEQFMSMFSDEASGNNNNNNTMMAHTLSSSNPSTPSDHNSINDEKEMENKEEEEKKQLKNESEDEDKSQCKQEITQLPNNDDSNNTSNANATCSSEKITDPKRVKRILANRQSAQRSRVRKLQYISELERSVTSLQAEVSVLSPRVAFLDHQRLLLNVDNSALKQRIAALAQDKIFKDAHQEALKREIERLRQVYHQQNIKKMDNNAAASPPSQSPSPSPKPRCETHTEKEQLINV

SEQ ID NO: 196 - protein, 330 aa, Glycine max
  misc_feature: Public GI no. 113367174
  misc_feature: Score of 721.7 for HMM of FIGURE 1
  misc_feature (193)..(233): Pfam Name: bZIP_2 Pfam Description: Basic region leucine zipper
  misc_feature: Functional Homolog of  Ceres CLONE ID no. 34553 at SEQ ID NO. 80
MAQLPPKIPNMTPNWPDFSSLHQKMPSLQTTSSNQNPSWVDEILEFSVARRGAPRRSVSDSVTFLEAPLLDHHHCKGGSVVGGGGGNNEFERFDDEQFMSMFSDEALRNNNNNNTMMAHTLSSSNPSTPSDHNSINDEKEMENKEEEEKKQLKNESEEDEDESQCKQEITQLPNNDDSKNNSNANATCSSEKITDPKRVKRILANRQSAQRSRVRKLQYISELERSVTSLQAEVSVSPRVAFLDHQRLLLNVDNSALKQRIAALAQDKIFKDAHQEALKREIERLRQVYHQQNIKKMDNAAGSPPSQSPPSPSPKPRCETHTEKEQLINV

SEQ ID NO: 197 - DNA, 1548 bp, Triticum aestivum
  misc_feature: Ceres CLONE ID no.908192
  misc_feature: Encodes the peptide sequence at SEQ ID NO. 198
tctctctctctctcttgctatttctctctttgcgcgcaggcataccacattccaagtcgctcctctctcctctgtcccgatttagctcagcgccgagctgagcccccacgccgtccattcgcccattgtttccgcggcggcggcggcagcaacgtgagccaaagcgagggccgtccaatttccggcacggcacggcccgagcctacattaccgctccagcccccggcgctgcaaaggtttgggcgctgcgccatccatcgcgcccgctgcccgcgccggttggttgattcgggggcgcggtccctcccggccatggcgcagctgccgcccaaggtccccgccatggcgccggcctggccggagttcggggacgggcaccaccacagcgcccacgcccacgcccgccaccaccatcaccagcgcagcccctccatgggcgccttcctcgccgcgccaatgccgccgctcccgcccgccaacggcggggtgcagcagcagccgtcctgggtcgacgagttcctcgacttctcggccgccaagcgcggcgcgcaccgccgcacggtcagcgactccgtcgccttcctcgacgacggcaatgccggcggcgtcggggcgcacgagttcgaccgcctcgacgacgaccagctcatgtgcatgttctccgacgagctggccccgcagcgccaggccgccagcgcgtcctcgccgtccgatcacaacagcgtcaacgacgagaagcaggacaggggcgacgccgaggaggcgcagagcgactgcaatggcgacgacggcgcggcgcccgggcagccgtcctcgcccgccacagccgatcccaagcgggtcaagaggatccttgcaaaccggcagtcggcgcagcggtcgcgcgtgcgcaagctgcactacatctcggagctcgagcgcagcgtcacgtcgctccagacggaggtatcggcattgtccccgcgcgtggcattcctggaccaccaacgctcgctgctgacgctggggaacagacacctcaagcagcgcatcgcggcgctcgcgcaggacaagatcttcaaagacgctcatcaggaggcactgaagaaggagatagagaggctgagccaaatctaccagcagcagcagagcctcagggacgcgcaacccccagcggacggcgacggccccccggtccgcggcgacgacaacgacggtctgatcgccggcgaggggaccgccgcggcctcgtgaccgagatccggcccgtcggcctcaggacaaccgagtgttgtcgctgttgttaggatttggtgcactgcattcattggcttgggttgggcttgcatttcctcggggtgtggtgtgattgatgtgtatgtaactcagcctgttcatgctgcttatttgttcattcttgcgtcctccgtctgctcctgatcgctcttctccacttcccctgatctgtaattttttctccggcattttgggcgaaggtcgtagctaaggatttgtaaaaactcggattggttgaggtcgagtggttccattacaaaaaaaaaaaaaaaa

SEQ ID NO: 198 - protein, 266 aa, Triticum aestivum
  misc_feature: Ceres CLONE ID no. 908192
  misc_feature: Score of 553.7 for HMM of FIGURE 1
  misc_feature (131)..(185): Pfam Name: bZIP_2 Pfam Description: Basic region leucine zipper
  misc_feature: Functional Homolog of  Ceres CLONE ID no. 34553 at SEQ ID NO. 80
MGAFLAAPMPPLPPANGGVQQQPSWVDEFLDFSAAKRGAHRRTVSDSVAFLDDGNAGGVGAHEFDRLDDDQLMCMFSDELAPQRQAASASSPSDHNSVNDEKQDRGDAEEAQSDCNGDDGAAPGQPSSPATADPKRVKRILANRQSAQRSRVRKLHYISELERSVTSLQTEVSALSPRVAFLDHQRSLLTLGNRHLKQRIAALAQDKIFKDAHQEALKKEIERLSQIYQQQQSLRDAQPPADGDGPPVRGDDNDGLIAGEGTAAAS

SEQ ID NO: 199 - protein, 276 aa, Oryza sativa subsp. indica
  misc_feature: Public GI no. 125538797
  misc_feature: Score of 587.7 for HMM of FIGURE 1
  misc_feature (145)..(199): Pfam Name: bZIP_2 Pfam Description: Basic region leucine zipper
  misc_feature: Functional Homolog of  Ceres CLONE ID no. 34553 at SEQ ID NO. 80
MAQLPPRAPSAAAAAAAAAGQEWSAMAAAGEFLGFAAARRGAHRRSASDSAAFLMEAAVPMDDVIVGVGGGGEFDRLDDEQLMSMFSDVEAPAVSDGGGGGGERGPAGEAHLMDMGDGDDGMGATSPAGAGAMAAAAAAAAADGIADPKRVKRILANRQSAQRSRVRKLQYISELERSVTTLQMEVSALSPRVAFLDHQRSLLTVGNSHLKQRIAALAQDKIFKDAHQEALKKEIERLRQVYHQQQIKATGGADIATAASMQAKHELLACEGAAMR

SEQ ID NO: 200 - protein, 330 aa, Oryza sativa subsp. japonica
  misc_feature: Public GI no. 115435234
  misc_feature: Score of 418.0 for HMM of FIGURE 1
  misc_feature (186)..(240): Pfam Name: bZIP_2 Pfam Description: Basic region leucine zipper
  misc_feature: Functional Homolog of  Ceres CLONE ID no. 34553 at SEQ ID NO. 80
MAQLPPKIPTMATAWPEFGGGHHHHAAHGHHHQRSPSMGAFLAAPLPPFPLPPPAPANGGAQQQQQQQQHQPSWVDEFLDFSATKRGAHRRSVSDSVAFLDPVSDDNAGVGAHDFDRLDDDQLMSMFSDDLQPPPPQQQPAAPAASASSPSDHNSMNDEKQDKGETDEAQSECDGATPGQPASPATVDPKRVKRILANRQSAQRSRVRKLQYISELERSVTSLQTEVSALSPRVAFLDHQRSLLTLGNSHLKQRIAALAQDKIFKDGGTEEGDREAAANLPPAKPQERGIPTGGRGPGPRPRQCRPDRQRGGRRGRAMPALVIGRDPDAL

SEQ ID NO: 201 - protein, 265 aa, Oryza sativa subsp. japonica; identical to SEQ ID NO: 86
  misc_feature: Public GI no. 115440013
  misc_feature: Score of 461.6 for HMM of FIGURE 1
  misc_feature (135)..(189): Pfam Name: bZIP_2 Pfam Description: Basic region leucine zipper
  misc_feature: Functional Homolog of  Ceres CLONE ID no. 34553 at SEQ ID NO. 80

SEQ ID NO: 202 - protein, 269 aa, Oryza sativa subsp. japonica
  misc_feature: Public GI no. 125581476
  misc_feature: Score of 571.4 for HMM of FIGURE 1
  misc_feature (138)..(192): Pfam Name: bZIP_2 Pfam Description: Basic region leucine zipper
  misc_feature: Functional Homolog of  Ceres CLONE ID no. 34553 at SEQ ID NO. 80
MAQLPPRAPSAAAAAGQEWSAMAAAGEFLGFAAARRGAHRRSASDSAAFLMEAAVPMDDVIVGVGGGGEFDRLDDEQLMSMFSDVEAPAVSDGGGERGPAGEAHLMDMGDGDDGMGATSPAGAGAMAAAAAGGAADGIADPKRVKRILANRQSAQRSRVRKLQYISELERSVTTLQMEVSALSPRVAFLDHQRSLLTVGNSHLKQRIAALAQDKIFKDAHQEALKKEIERLRQVYHQQQIKATGGADIATAASMQAKHELLACEGAAMR

SEQ ID NO: 203 - protein, 269 aa, Oryza sativa subsp. japonica; identical to SEQ ID NO: 87
  misc_feature: Public GI no. 115445299
  misc_feature: Score of 571.1 for HMM of FIGURE 1
  misc_feature (138)..(192): Pfam Name: bZIP_2 Pfam Description: Basic region leucine zipper
  misc_feature: Functional Homolog of  Ceres CLONE ID no. 34553 at SEQ ID NO. 80

SEQ ID NO: 204 - DNA, 1356 bp, Gossypium hirsutum
  misc_feature: Ceres CLONE ID no.1973945
  misc_feature: Encodes the peptide sequence at SEQ ID NO. 205
gctgcttcagtttttcactatacaccactatacccaatatggggagatcaccttgctgtgacaaagtagggttgaagaaaggaccttggacacctgaagaagaccagaaactcttggcttacattgaagaacatggtcgtggaagctggcgttccttgcccgccaaagccggtcttcaaagatgtgggaaaagttgcaggctcagatggactaattatctaaggcctgatattaagagaggaaaatttagtttgcaagaagagcaaactatcatccaacttcatgcccttttagggaacaggtggtctgcgattgccactcacttgccaaaaagaacagataatgagataaaaaattactggaacactcatcttaagaaaaggttagctaaaatggggatcgatcccatcactcacaaacccaaaaacgatgctttactctccactactgatggtcaatccaagaatgcagccaaccttagccatatggctcaatgggagagtgctagactcgaagctgaagctcgactggttcgagaatcaaagatccattcacattcagttcaacatcatcaccacttcaatccccctgcttttacccttgagtctcctacatccactctttctgtctcagaaaatgcaccaccaatcattacagggctcggtgtgagtccgatgccgatgatcgagttcgtcggcaccacctcgggttcctccgagacggcggggatcgttaaagaagaaggtgaacaagagtggaaagagcttggaagttcaagcaatttggctgattacaaagagggtatggggaattctttgtcatcattcacatctagtcttcaggatatgacaatttctattgaaggaggatggactccagagtctttgaggccaaacaacattaatgttaataatgttgggaatataatggaggaaggtttcactaatcttcttcttaatgattccatcgaccggagtttatcggatagcggcaaagaatctgacgaaaacatcggaggcagcggggatggcagtgattactatgaagataacaagaactattggaacagtattcttaatttggtgaattcttccccatcagattcaccaatgttctaaacagtttaattatatatatcgcaattgttctaaaagctgtgaaataccatcaggttatataaatcggtattttccactgtttcctctacaaagggaaaagctttgacatgttctacgtagttgatagaattttaacatgttttgagtgacatccaatgacaattttctctttgtattgttatgttcatatatatatatatttgaaaaacctttgtagtaaaaaaaaaaaaaaaaaaaa

SEQ ID NO: 205 - protein, 359 aa, Gossypium hirsutum
  misc_feature: Ceres CLONE ID no. 1973945
  misc_feature: Score of 716.1 for HMM of FIGURE 4
  misc_feature (14)..(61): Pfam Name: Myb_DNA-binding Pfam Description: Myb-like DNA-binding domain
  misc_feature: Functional Homolog of  Ceres CLONE ID no. 34589 at SEQ ID NO. 95
MGRSPCCDKVGLKKGPWTPEEDQKLLAYIEEHGRGSWRSLPAKAGLQRCGKSCRLRWTNYLRPDIKRGKFSLQEEQTIIQLHALLGNRWSAIATHLPKRTDNEIKNYWNTHLKKRLAKMGIDPITHKPKNDALLSTTDGQSKNAANLSHMAQWESARLEAEARLVRESKIHSHSVQHHHHFNPPAFTLESPTSTLSVSENAPPIITGLGVSPMPMIEFVGTTSGSSETAGIVKEEGEQEWKELGSSSNLADYKEGMGNSLSSFTSSLQDMTISIEGGWTPESLRPNNINVNNVGNIMEEGFTNLLLNDSIDRSLSDSGKESDENIGGSGDGSDYYEDNKNYWNSILNLVNSSPSDSPMF

SEQ ID NO: 206 - protein, 309 aa, Gossypium hirsutum
  misc_feature: Public GI no. 13346188
  misc_feature: Score of 443.3 for HMM of FIGURE 4
  misc_feature (14)..(61): Pfam Name: Myb_DNA-binding Pfam Description: Myb-like DNA-binding domain
  misc_feature: Functional Homolog of  Ceres CLONE ID no. 34589 at SEQ ID NO. 95
MGRSPCCEKVGLKKGPWTPEEDQKLLAYIEQHGHGSWRALPLKAGLQRCGKSCRLRWINYLRPDIKRGKFSLQEEQTIIQLHALLGNRWSAIATHLPKRTDNEIKNYWNTHLKKRLTKMGIDPVTHKPKTDALGSTTGNPIDAANLSHMAQWESARLEAEARLVRESKLVPSNPPQSNHFTAVAPSPTPATRPQCLDVLKAWQGVVCGLFTFNMDNNNLQSPTSTLNFMENTTTLPMSSSSSVNGMFNENFGWNSSINPCESGDILKVEYGSDQIPELKERLDHPMELHEMDCSSEGTWFQELFGFNGL

SEQ ID NO: 207 - DNA, 1131 bp, Populus balsamifera subsp. trichocarpa
  misc_feature: Ceres ANNOT ID no.1448769
  misc_feature: Encodes the peptide sequence at SEQ ID NO. 208
atgggtagagcaccttgttgtgacaaaaatgggctaaagaaagggccttggaccccggaagaggatcagaagctggttgattacatacaaaaacatggctatggcaactggaggacacttccaaagaatgctgggttgcaaaggtgcggaaagagttgtcgtcttcgttggaccaactatctgaggcctgatatcaagagaggtcggttttctttcgaagaagaggagacaataattcagctgcatagtatattgggaaacaagtggtctgccattgctgctcgattgcctggaagaacagacaacgagatcaagaactactggaacacacacattaggaagaggcttctaagaatgggaattgatccggtgactcatagtccaagacttgatcttcttgacctctcctcaatcctgagctcatctctttacaactcctctgatcaaatgaacatgtcaagaatgcttggtgtcccacctttagtgaacccaggacttctaaggctagccacatctctcttatcttctcaacgtgaccaaacccaaaacttcgtcatccaaaatggtcaagaagaaaaccatcttcccaacccacaagtccaacaaagccaatacgaatcgatgattcatcaagctaatatccagtttcaaaccccaggtcaagaaatgcctacttgcaccacattgactaccagcccctgtgttacattttctaacgaagcacgaattatggaccctaatgtggaccaataccagtcaagtaccattaccaactttagctctccaaattctcagttcagtactcatgatcagtggcaaaacaatggaatgggctccaatttagctgaagattattatgtgcctgctgtatcaagttacaacagcaacggctactatgggtctgaccttatggacccttcttccgagacctcgacttttatctccaacagcagcaaccagaactttggttttgcttcagttttatcaactccttcttcaagtcctacgccattgaactccaattcaacttacatcaatagcagcagcgctgaagatgagagggaaagctactgcagcaacatcttgaaattcgaaatcccagatattttggatgctattaacttcatgtaa

SEQ ID NO: 208 - protein, 376 aa, Populus balsamifera subsp. trichocarpa
  misc_feature: Ceres ANNOT ID no. 1448769
  misc_feature: Score of 720.2 for HMM of FIGURE 4
  misc_feature (67)..(112): Pfam Name: Myb_DNA-binding Pfam Description: Myb-like DNA-binding domain
  misc_feature: Functional Homolog of  Ceres CLONE ID no. 34589 at SEQ ID NO. 95
MGRAPCCDKNGLKKGPWTPEEDQKLVDYIQKHGYGNWRTLPKNAGLQRCGKSCRLRWTNYLRPDIKRGRFSFEEEETIIQLHSILGNKWSAIAARLPGRTDNEIKNYWNTHIRKRLLRMGIDPVTHSPRLDLLDLSSILSSSLYNSSDQMNMSRMLGVPPLVNPGLLRLATSLLSSQRDQTQNFVIQNGQEENHLPNPQVQQSQYESMIHQANIQFQTPGQEMPTCTTLTTSPCVTFSNEARIMDPNVDQYQSSTITNFSSPNSQFSTHDQWQNNGMGSNLAEDYYVPAVSSYNSNGYYGSDLMDPSSETSTFISNSSNQNFGFASVLSTPSSSPTPLNSNSTYINSSSAEDERESYCSNILKFEIPDILDAINFM

SEQ ID NO: 209 - DNA, 1038 bp, Populus balsamifera subsp. trichocarpa
  misc_feature: Ceres ANNOT ID no.1501772
  misc_feature: Encodes the peptide sequence at SEQ ID NO. 210
atgggtagagcaccttgttgtgacaaaaatgggctaaagaaagggccttggaccccggaagaggatcagaagctggttgattacatacaaaaacatggctatggcaactggaggacacttccaaagaatgctgggttgcaaaggtgcggaaagagttgtcgtcttcgttggaccaactatctgaggcctgatatcaagagaggtcggttttctttcgaagaagaggagacaataattcagctgcatagtatattgggaaacaagtggtctgccattgctgctcgattgcctggaagaacagacaacgagatcaagaactactggaacacacacattaggaagaggcttctaagaatgggaattgatccggtgactcatagtccaagacttgatcttcttgacctctcctcaatcctgagctcatctctttacaactcctctgatcaaatgaacatgtcaagaatgcttggtgtcccacctttagtgaacccaggacttctaaggctagccacatctctcttatcttctcaacgtgaccaaacccaaaacttcgtcatccaaaatggtcaagaagaaaaccatcttcccaacccacaagtccaacaaagccaatacgaatcgatgattcatcaagctaatatccagtttcaaaccccaggtcaagaaatgcctacttgcaccacattgactaccagcccctgtgttacattttctaacgaatggcaaaacaatggaatgggctccaatttagctgaagattattatgtgcctgctgtatcaagttacaacagcaacggctactatgggtctgaccttatggacccttcttccgagacctcgacttttatctccaacagcagcaaccagaactttggttttgcttcagttttatcaactccttcttcaagtcctacgccattgaactccaattcaacttacatcaatagcagcagcgctgaagatgagagggaaagctactgcagcaacatcttgaaattcgaaatcccagatattttggatgctattaacttcatgtaa

SEQ ID NO: 210 - protein, 345 aa, Populus balsamifera subsp. trichocarpa
  misc_feature: Ceres ANNOT ID no. 1501772
  misc_feature: Score of 732.5 for HMM of FIGURE 4
  misc_feature (67)..(112): Pfam Name: Myb_DNA-binding Pfam Description: Myb-like DNA-binding domain
  misc_feature: Functional Homolog of  Ceres CLONE ID no. 34589 at SEQ ID NO. 95
MGRAPCCDKNGLKKGPWTPEEDQKLVDYIQKHGYGNWRTLPKNAGLQRCGKSCRLRWTNYLRPDIKRGRFSFEEEETIIQLHSILGNKWSAIAARLPGRTDNEIKNYWNTHIRKRLLRMGIDPVTHSPRLDLLDLSSILSSSLYNSSDQMNMSRMLGVPPLVNPGLLRLATSLLSSQRDQTQNFVIQNGQEENHLPNPQVQQSQYESMIHQANIQFQTPGQEMPTCTTLTTSPCVTFSNEWQNNGMGSNLAEDYYVPAVSSYNSNGYYGSDLMDPSSETSTFISNSSNQNFGFASVLSTPSSSPTPLNSNSTYINSSSAEDERESYCSNILKFEIPDILDAINFM

SEQ ID NO: 211 - DNA, 1125 bp, Populus balsamifera subsp. trichocarpa
  misc_feature: Ceres ANNOT ID no.1465830
  misc_feature: Encodes the peptide sequence at SEQ ID NO. 212
atggggagggcaccttgctgtgaaaaaaaggggctaaagaaagggccgtggacaccagatgaggatcagaagctgattgattacatacaaaaacatggctatggcaactggagaacacttccaaagaatgctgggttgcagaggtgtggaaagagttgtcgtcttcgttggactaactatttgaggcctgatatcaagagaggtcgattttctttcgaggaagaagagacaataattcagctacatggtattttgggaaacaagtggtctgccattgctgctcgactgcctggaagaaccgacaacgaaatcaagaactactggaacacacacatcaggaaaaggcttctgagaatgggaattgatccagtgactcatagtccaaggcttgatcttttagacctctcctcaatcctcaactcgcctctttacgactccaggatgaacatgtcaagagttcttggggttcaacctctaggcgacccagaactcttaaggctagccacatctctcttatcttctcaacgtgaccaaacccaagattttgctatccaaaatggtcatcaagaaaaccatctttccagcccacaagtccatcaaagccagcaccaatcgataattcatcaagctaaccagtttcaaaccccaggtcaagaaatgcctacgtgcactacattgactaccaccccttgtgttacattttctaatgaagcacagcaaatggaccccaacgtagaccaataccaattaagcactattaccagctttagctctccaaattctcagttaagcacacatgatcagtggcaaagcaacaggatgggctcgaatttatcacaagattattatctgcctgcagtatcaagttacaacagcgccgacaactgccatgggactgatcttgtagacccttcttctgaggcctcaacttttatttccaataacagcaaccaaacctttggttttgcttcagttttatcaactccttcctcaagtccagcgccattgaactccaattcaacatacatcaattgcagcagcactgaagatgagagggatagctattgcagcaacatcttgaaattcgaaatcccagatattttagatgtcagtaacttcatgtaa

SEQ ID NO: 212 - protein, 374 aa, Populus balsamifera subsp. trichocarpa
  misc_feature: Ceres ANNOT ID no. 1465830
  misc_feature: Score of 626.3 for HMM of FIGURE 4
  misc_feature (14)..(61): Pfam Name: Myb_DNA-binding Pfam Description: Myb-like DNA-binding domain
  misc_feature: Functional Homolog of  Ceres CLONE ID no. 34589 at SEQ ID NO. 95
MGRAPCCEKKGLKKGPWTPDEDQKLIDYIQKHGYGNWRTLPKNAGLQRCGKSCRLRWTNYLRPDIKRGRFSFEEEETIIQLHGILGNKWSAIAARLPGRTDNEIKNYWNTHIRKRLLRMGIDPVTHSPRLDLLDLSSILNSPLYDSRMNMSRVLGVQPLGDPELLRLATSLLSSQRDQTQDFAIQNGHQENHLSSPQVHQSQHQSIIHQANQFQTPGQEMPTCTTLTTTPCVTFSNEAQQMDPNVDQYQLSTITSFSSPNSQLSTHDQWQSNRMGSNLSQDYYLPAVSSYNSADNCHGTDLVDPSSEASTFISNNSNQTFGFASVLSTPSSSPAPLNSNSTYINCSSTEDERDSYCSNILKFEIPDILDVSNFM

SEQ ID NO: 213 - protein, 271 aa, Arabidopsis thaliana
  misc_feature: Public GI no. 15221257
  misc_feature: Score of 561.3 for HMM of FIGURE 4
  misc_feature (67)..(112): Pfam Name: Myb_DNA-binding Pfam Description: Myb-like DNA-binding domain
  misc_feature: Functional Homolog of  Ceres CLONE ID no. 34589 at SEQ ID NO. 95
MGRTTWFDVDGLRKGEWTAEEDRKLVVYINEHGLGEWGSLPKRAGLQRCGKSCRLRWLNYLRPGIKRGKFTPQEEEEIIKYHALLGNRWAAIAKQMPNRTDNDIKNHWNSCLKKRLAKKGIDPMTHEPTTTTSLTVDVTSSSTTSSPTPSPTSSSFSSCSSTGSARFLNKLAAGISSRKHGLESIKTVILAEQPREAVDEEKMMTINMKEKELISCYMEIDETMSIDELPCDDSTSGFVAFDDYSLIDPYRDGVYVSDFYDETEHLDLFLL

SEQ ID NO: 214 - DNA, 1317 bp, Glycine max
  misc_feature: Ceres CLONE ID no.1371146
  misc_feature: Encodes the peptide sequence at SEQ ID NO. 215
acacactttctttattttctcacgtctccaaaagcttctccctctttctttttttttctatcacgcaaactcatcatttagctatagtagcttaattaagtagctcaacaagttcaaattacaatgggtagatcaccttgttgtaacaaaaatggcctcaagaaaggaccatggacaccagaagaagaccaaaaacttattgattacattcagaaacatgggtacggcaattggagagtactcccaaagaatgctggtttgcaaaggtgtggaaagagttgccgtctccgttggacaaactatctccgaccagatataaagcgaggtcaattcacttttgaagaggaagagactataatacagctacatagcattcttggcaacaagtggtcagctattgcttctcgcttacccggaagaacagacaatgaaatcaagaattactggaacacccacattagaaaaaggcttctaaggatgggaattgaccctgtgacacataggccaaggcttgatcttttggacctatcttccatcttaagttcaaccctctacggttcaacacaaatgaacatccaaagacttcttggcactaacacagtggtgaaccctgagcttctaaagttggcctcgtcacccttcccctctctgcagcaacgccaacaccaaaacatgtgtgcacaaaattgtgaagagaaccatctctgtgacccccaaattcagaaccaaatccctcaggacttggctcaagaagcattgcctttcaatcatacacagtttgttgaatccaatatgaatattattccatacccttcaattttccaagactctagcttccaacaacattctcaaccaagtgatttgcattgcaacggaattgatcatacaagttatgttcctcaattaccaaactatgattaccctccaatttctgaactctcaacttataacaattcctataacaacaaccagaacttcagctacacttcagttctctcaacgccttcttcaagtcccacaccgttgaattcgaactcgacgtatgtcaatgggtgcagcagcactgaggatgagacagaaagctatgtcagtagcaacaacttgttgagatttgaaatcccagatatgctatgcgtatgactaagtactcatataattaacttattcacatcatgaaacaatcgtctcgaacaaaattgatttatttatctggggctagctagataatcacaatggatcgattgtgttcatacttgtaacattttctaaatttttaatagtattggtagttgactttctgcaaaaaaaaaaaaaaaa

SEQ ID NO: 215 - protein, 338 aa, Glycine max
  misc_feature: Ceres CLONE ID no. 1371146
  misc_feature: Score of 702.3 for HMM of FIGURE 4
  misc_feature (14)..(61): Pfam Name: Myb_DNA-binding Pfam Description: Myb-like DNA-binding domain
  misc_feature: Functional Homolog of  Ceres CLONE ID no. 34589 at SEQ ID NO. 95
MGRSPCCNKNGLKKGPWTPEEDQKLIDYIQKHGYGNWRVLPKNAGLQRCGKSCRLRWTNYLRPDIKRGQFTFEEEETIIQLHSILGNKWSAIASRLPGRTDNEIKNYWNTHIRKRLLRMGIDPVTHRPRLDLLDLSSILSSTLYGSTQMNIQRLLGTNTVVNPELLKLASSPFPSLQQRQHQNMCAQNCEENHLCDPQIQNQIPQDLAQEALPFNHTQFVESNMNIIPYPSIFQDSSFQQHSQPSDLHCNGIDHTSYVPQLPNYDYPPISELSTYNNSYNNNQNFSYTSVLSTPSSSPTPLNSNSTYVNGCSSTEDETESYVSSNNLLRFEIPDMLCV

SEQ ID NO: 216 - protein, 196 aa, Glycine max
  misc_feature: Public GI no. 110931782
  misc_feature: Score of 309.1 for HMM of FIGURE 4
  misc_feature (60)..(105): Pfam Name: Myb_DNA-binding Pfam Description: Myb-like DNA-binding domain
  misc_feature: Functional Homolog of  Ceres CLONE ID no. 34589 at SEQ ID NO. 95
DKNGLKKGPWTTEEDQKLIDYIQKHGYGNWRTLPKNAGLQRCGKSCRLRWTNYLRPDIKRGRFSFEEEETIIQLHSILGNKWSAIASRLPGRTDNEIKNYWNTHIRKRLLRMGIDPVTHSPRLDLLDINSILNASFYGSSQINIQRLLGMHQYMVNPELLKLASSLFSTSQQQHNDPDDMPAQKGQLQNQLCDPQI

SEQ ID NO: 217 - DNA, 945 bp, Triticum aestivum
  misc_feature: Ceres CLONE ID no.1020930
  misc_feature: Encodes the peptide sequence at SEQ ID NO. 218
ctcagaagcaggagagagagctcgctgccgccctgccctgccctgctctagagtctagaaggtcgaccggcatggggaggtcgccgtgctgcgagaaggagcacaccaacaagggggcgtggaccaaggaggaggaccagcggctgatcgcctacatcagggccaacggcgagggctgctggcgctcgctgcccaaggcggcgggcctgctgcggtgcggcaagagctgccgcctccgctggatgaactacctccgccccgacctcaagcgcggcaacttcaccgacgaggaagacgagctcatcatccgcctccacagcctcctcggcaacaagtggtcgctgatcgccggccagctgccgggccggacggacaacgagatcaagaactactggaacacgcacatcaagcgcaagctcctctcccgcggcatggacccccacacgcaccgcccgctcaccgccgtcgacggcggcgccgcgtcgtcccgcccggcacacatcgcagtgccggcgagggcagcgccgcccacgatgttcgccctgccaacaaagcagcctcccgtggattcctcctcctccgacggcagcagcggcgcgacgagcacgggggagccgcgatgccccgacctgaacctggacctgtcggtaggcccgccggcggccgacacgccgacctcgcaccccgtctgcctctgccgccacctcggcctccaaggcggggcggcgtgcagctgccgccagggcgacagcccgggctcccaggggggcgggttcagatatttcaggccgctggaggaaggccagtacatatgagacgagacgggacggctaggccctaggctccacagcaatttgtaagacggcgaatttttccacctccgcagcaccactgtccaacgaaacggtgaagaaaaatctaatctgtttaaaaaaaaaaaaaaaa

SEQ ID NO: 218 - protein, 247 aa, Triticum aestivum
  misc_feature: Ceres CLONE ID no. 1020930
  misc_feature: Score of 452.4 for HMM of FIGURE 4
  misc_feature (67)..(112): Pfam Name: Myb_DNA-binding Pfam Description: Myb-like DNA-binding domain
  misc_feature: Functional Homolog of  Ceres CLONE ID no. 34589 at SEQ ID NO. 95
MGRSPCCEKEHTNKGAWTKEEDQRLIAYIRANGEGCWRSLPKAAGLLRCGKSCRLRWMNYLRPDLKRGNFTDEEDELIIRLHSLLGNKWSLIAGQLPGRTDNEIKNYWNTHIKRKLLSRGMDPHTHRPLTAVDGGAASSRPAHIAVPARAAPPTMFALPTKQPPVDSSSSDGSSGATSTGEPRCPDLNLDLSVGPPAADTPTSHPVCLCRHLGLQGGAACSCRQGDSPGSQGGGFRYFRPLEEGQYI

SEQ ID NO: 219 - DNA, 1105 bp, Triticum aestivum
  misc_feature: Ceres CLONE ID no.764797
  misc_feature: Encodes the peptide sequence at SEQ ID NO. 220
agaaacaggagagagctcgcttcctccctgccctgccctgccctgctctagcaccggcctgagctcgcgcgtggtgttactgctgagtttggccggaatggggcggtcgccgtgctgcgagaaggagcacaccaacaagggggcctggaccaaggaggaggaccagcggctggtcgcctacatcagggccaacggcgagggctgctggcgctcgctgcccaaggcggccggcctgctccgctgcggcaagagctgccgcctgcgctggatgaactacctccgtcccgacctcaagcgcggcaacttcaccgacgacgaggacgagctcatcatccgcctccacagcctcctcggcaacaagtggtctctgatcgccgggcagctgccgggcaggacggacaacgagatcaagaactactggaacacgcacatcaagcgcaagctcctgtcccgcggcatggacccccacacgcaccgcccgctcacggccgtcgacggcggcgcggcatcccgccctgcacacatagcagtgccggcgagggcagcgccacccacgatgttcgccctgccgacaaagcagccgccggtcgtggagtcgtcgtccgacgacggcagcagcggcgcgacgagcacgggggaaccacggtgccccgacctaaacctcgacctgtcggtgggcccgccggcggccgacacgccgacctcgcacccggtctgcctctgccgccacctcggcttccgcggcggggaggcatgcagctgccgtcaggccgacagcccgggctcccaggggggcgggttcagatatttcaggccgttggaggaaggccagtacatatgagacgagacgagacggctaggccctaggctccacagcaatttgcaagacggtgaatttttccacctccacagcaccaccgtctcacaaaacggtgaaaaaaacggtgaaagaatatctaatctgttcatagtatttcaaccatgaatatttgtcctctctgtccctaattttgtatcgttggttggtgctgtgtttggtggaaaaaacgaggggataatgtgacaaaggttggtgtgtgttttttgcgcaaaaaaaaaaaaaaaa

SEQ ID NO: 220 - protein, 247 aa, Triticum aestivum
  misc_feature: Ceres CLONE ID no. 764797
  misc_feature: Score of 436.9 for HMM of FIGURE 4
  misc_feature (67)..(112): Pfam Name: Myb_DNA-binding Pfam Description: Myb-like DNA-binding domain
  misc_feature: Functional Homolog of  Ceres CLONE ID no. 34589 at SEQ ID NO. 95
MGRSPCCEKEHTNKGAWTKEEDQRLVAYIRANGEGCWRSLPKAAGLLRCGKSCRLRWMNYLRPDLKRGNFTDDEDELIIRLHSLLGNKWSLIAGQLPGRTDNEIKNYWNTHIKRKLLSRGMDPHTHRPLTAVDGGAASRPAHIAVPARAAPPTMFALPTKQPPVVESSSDDGSSGATSTGEPRCPDLNLDLSVGPPAADTPTSHPVCLCRHLGFRGGEACSCRQADSPGSQGGGFRYFRPLEEGQYI

SEQ ID NO: 221 - DNA, 1286 bp, Zea mays
  misc_feature: Ceres CLONE ID no.325641
  misc_feature: Encodes the peptide sequence at SEQ ID NO. 222
gtcacttcattcccttgtcactagctagatcgactgactggagaggagctatcgtctactacctctgggcgagctgcgtgtcctgtcgtccttctcgctcctgtggtcgccgcgcgcggcggtgcgatggggcggtcgccgtgctgcgagaaggaggccgggctgaagaaggggccgtggacgtccgaggaggaccagaaactgctggccttcatcgagcagcacggacacggctgctggcgctcgctgccggctaaggccggtctgcggcggtgcggcaagagctgccggctccggtggaccaactacctgcggccggacatcaagcggggcaagttcacgctgcaggaggagcagaccatcatccagctccacgctctcctcggcaacaggtggtcgtcgatcgcgacgcacctgcccaagcgcacggacaacgagatcaagaactactggaacacgcacctcaagaagcggctcgccaagatgggcatcgaccccgtcacgcacaaggcccgcgccgacgtggggggctcctctggcgcaggcaacaactctggagcgcgctacagggcagccgcgcacctcagccacacggcgcagtgggagagcgcgcgcctcgaggccgaggcgcgtctggcgcgcgaggccaggctgcgtgcccttgcctcgccgccgccgccgccagggccagggccgggacccgcgtttagcgggctcgagtcgccgacatcgactctgagcttctccgagagcgtgctgttcgccagtgcggcgcacgacacccacgccctgacgtcacgcgcttacgcagaggcgttcggggcggagcagcaacagcgcttcgctgacactgccgccgccgscgacgccgcgccaggcttccttgcaggcgtccttctcggctgctccgtcgccggcgcggagaaggggttcgcggcctcgtcgacggacgccagcgtctgtgagcagcagcaggaggaagaggacaagggctactggagcagcatactgaacatggtcaactcctccatgtcgtcgtccacgtcctcgctgacttctgatgctgtcacggaccccgccgccgcgtacttgccgccggcgacggcggcggccgagttctgagtgattgtcgtccaataataacgaacctgtgctaatgttaccttgtcatgtgtgttgcttactagtaggtgcgttttggtgctagttagtttatttacgtgctaatgggctgtcgcccacgtgtgcttgtgctttatgatgtgcaataataaacatgtacgtmc

SEQ ID NO: 222 - protein, 331 aa, Zea mays
  misc_feature: Ceres CLONE ID no. 325641
  misc_feature: Score of 664.7 for HMM of FIGURE 4
  misc_feature (15)..(62): Pfam Name: Myb_DNA-binding Pfam Description: Myb-like DNA-binding domain
  misc_feature: Functional Homolog of  Ceres CLONE ID no. 34589 at SEQ ID NO. 95
  misc_feature (246)..(246): Xaa is any aa, unknown, or other
MGRSPCCEKEAGLKKGPWTSEEDQKLLAFIEQHGHGCWRSLPAKAGLRRCGKSCRLRWTNYLRPDIKRGKFTLQEEQTIIQLHALLGNRWSSIATHLPKRTDNEIKNYWNTHLKKRLAKMGIDPVTHKARADVGGSSGAGNNSGARYRAAAHLSHTAQWESARLEAEARLAREARLRALASPPPPPGPGPGPAFSGLESPTSTLSFSESVLFASAAHDTHALTSRAYAEAFGAEQQQRFADTAAAXDAAPGFLAGVLLGCSVAGAEKGFAASSTDASVCEQQQEEEDKGYWSSILNMVNSSMSSSTSSLTSDAVTDPAAAYLPPATAAAEF

SEQ ID NO: 223 - protein, 345 aa, Oryza sativa subsp. indica
  misc_feature: Public GI no. 116310449
  misc_feature: Score of 735.4 for HMM of FIGURE 4
  misc_feature (14)..(61): Pfam Name: Myb_DNA-binding Pfam Description: Myb-like DNA-binding domain
  misc_feature: Functional Homolog of  Ceres CLONE ID no. 34589 at SEQ ID NO. 95
MGRSPCCEKEGLKKGPWTPEEDQKLLAYIEQHGHGCWRSLPSKAGLQRCGKSCRLRWTNYLRPDIKRGKFSLQEEQTIIQLHALLGNRWSAIATHLPKRTDNEIKNYWNTHLKKRLAKMGIDPVTHKPRSDVAGAGGGGGGAAGGAAGAQHAKAAAHLSHTAQWESARLEAEARLAREAKLRALAASATPGAPHLPAPPASAAAAAEAHGLDSPTSTLSFSESAVLATVLEAHGAAAAAAARAAMQPMQAYDEACKDQHWGDVDAADVGFPGAGAGFTGLLLEGSLNQIPRPAGRDAEADGEFQETEEEKNYWNSILNLVNSSSAPMSTAVVVPASHAYSPAPDF

SEQ ID NO: 224 - protein, 345 aa, Oryza sativa subsp. japonica
  misc_feature: Public GI no. 115458786
  misc_feature: Score of 733.2 for HMM of FIGURE 4
  misc_feature (14)..(61): Pfam Name: Myb_DNA-binding Pfam Description: Myb-like DNA-binding domain
  misc_feature: Functional Homolog of  Ceres CLONE ID no. 34589 at SEQ ID NO. 95
MGRSPCCEKEGLKKGPWTPEEDQKLLAYIEQHGHGCWRSLPSKAGLQRCGKSCRLRWTNYLRPDIKRGKFSLQEEQTIIQLHALLGNRWSAIATHLPKRTDNEIKNYWNTHLKKRLAKMGIDPVTHKPRSDVAGAGGGGGGAAGGAAGAQHAKAAAHLSHTAQWESARLEAEARLAREAKLRALAASATPGAPHLPAPPASAAAAAAAHGLDSPTSTLSFSESAVLATVLEAHGAAAAAAARAAMQPMQAYDEACKDQHWGDVDAADVGFPGAGAGFTGLLLEGSLNQIPRPAGRDAEADGEFQETEEEKNYWNSILNLVNSSSAPMSTAVVVPASHAYSPAPDF

SEQ ID NO: 225 - DNA, 1330 bp, Gossypium hirsutum
  misc_feature: Ceres CLONE ID no.1929841
  misc_feature: Encodes the peptide sequence at SEQ ID NO. 226
ccattctactttcaccacgaaaccttccctttctctctttcaacgctttcctttccctttctttttcctttctttccttattctcattgctataaaacccatcatttatatcattagcaagaaaaaaaaaccagacccattttttatttttattttttaaattttttcctgcttgaaattgctctctctgataaccccaaatcctcaagtttcttgtggagagagaaaaaacagaaacccaaaaacaaaaaaaggggaaaaaaattctaaattcagtatccattttaattgacaatttaaaaggatgggtcaagcttttcgcaagctcttcgatacctttttcggtaactcagagatgagggttgtgatgcttggccttgatgcagctggaaaaacaactatattgtacaagttgcacattggagaagttttatcaactgtccccactattggattcaatgtggagaaagttcaatataagaatgtgatgtttacagtttgggatgttggtggacaagagaaactaaggccactctggaggcactactttaataacacagatggattgatctacgttgttgattccttggaccgagagaggattgggaaagctaaaaatgaatttcagactattatcaatgatccatttatgctcaacagtgtcatcttggtgttcgccaacaaacaggacatgaaaggagcaatgactccaatggaagtatgtgaaggattaggcctttttgatctgaagaaccgaaaatggcacatacaaggtacttgtgcacttagaggagatggtctctatgaaggcttggactggttagccagtacgctcaaggcaatgagagctgctggatattcatcgataggttcatcatcattctcataaacacaggttccaaccccttctcttgcctatattcccattaaaacggagctcgtaaacaagaaaataattcttgacaacttcattcccagatacatcatcatcattgaagcttgtaagccgtgtttaaatcactaggaagttcgatgttgtaatcgaagtgttttttttttttttaatcggtttagtctaaaagctgatgaaagtctagtaggggggtgtttccccttgcatcttatatggcacttagatgagtgagtttctaccaatgtgtgcatattaaaaaaggcaggtattacatcaaatgaatttcatttgcttaccagggatatttagattattgacccataaaactcatataaagtggaaaatgattgtcattttgagttttcttttgttttttcagtcaagaatttgaggttgcaaaaaaaaaaaaaaaaaaaa

SEQ ID NO: 226 - protein, 194 aa, Gossypium hirsutum
  misc_feature: Ceres CLONE ID no. 1929841
  misc_feature: Score of 504.5 for HMM of FIGURE 9
  misc_feature (5)..(177): Pfam Name: Arf Pfam Description: ADP-ribosylation factor family
  misc_feature: Functional Homolog of  Ceres CLONE ID no. 316638 at SEQ ID NO. 98
MGQAFRKLFDTFFGNSEMRVVMLGLDAAGKTTILYKLHIGEVLSTVPTIGFNVEKVQYKNVMFTVWDVGGQEKLRPLWRHYFNNTDGLIYVVDSLDRERIGKAKNEFQTIINDPFMLNSVILVFANKQDMKGAMTPMEVCEGLGLFDLKNRKWHIQGTCALRGDGLYEGLDWLASTLKAMRAAGYSSIGSSSFS

SEQ ID NO: 227 - DNA, 411 bp, Populus balsamifera subsp. trichocarpa
  misc_feature: Ceres ANNOT ID no.1470444
  misc_feature: Encodes the peptide sequence at SEQ ID NO. 228
atgggtcaagcctttcgcaagcttttcgacaccttctttggcaacaccgagatgcgggttgtgatgctgggacttgatgcagctggtaaaactaccatactttacaagttgcacattggagaagtattatctactgtccctaccattgggttcaatgtggagaaagttcagtacaagaatgtggtattcaccgtttgggatgttggtggacaagagaaattaaggccgctctggaggcattacttcaataacactgatggactgatatatgttgttgattcattggaccgagagagaatcggaaaagcaaaggcagaatttcaggttgtatattcagaaagaccatcatcaaagatccatttatgctcaacagtgtcatcttggtgtttgccaacaaacaggacatggtaa

SEQ ID NO: 228 - protein, 136 aa, Populus balsamifera subsp. trichocarpa
  misc_feature: Ceres ANNOT ID no. 1470444
  misc_feature: Score of 307.4 for HMM of FIGURE 9
  misc_feature (5)..(108): Pfam Name: Arf Pfam Description: ADP-ribosylation factor family
  misc_feature: Functional Homolog of  Ceres CLONE ID no. 316638 at SEQ ID NO. 98
MGQAFRKLFDTFFGNTEMRVVMLGLDAAGKTTILYKLHIGEVLSTVPTIGFNVEKVQYKNVVFTVWDVGGQEKLRPLWRHYFNNTDGLIYVVDSLDRERIGKAKAEFQVVYSERPSSKIHLCSTVSSWCLPTNRTW

SEQ ID NO: 229 - protein, 192 aa, Arabidopsis thaliana
  misc_feature: Public GI no. 15237901
  misc_feature: Score of 496.7 for HMM of FIGURE 9
  misc_feature (5)..(177): Pfam Name: Arf Pfam Description: ADP-ribosylation factor family
  misc_feature: Functional Homolog of  Ceres CLONE ID no. 316638 at SEQ ID NO. 98
MGQAFRKLFDTFFGNQEMRVVMLGLDAAGKTTILYKLHIGEVLSTVPTIGFNVEKVQYKNVMFTVWDVGGQEKLRPLWRHYFNNTDGLIYVVDSLDRERIGKAKQEFQEIIKDPFMLNSIILVFANKQDMRGAMSPREVCEGLGLFDLKNRKWHIQGTCALRGDGLYEGLDWLSSTLKDVKAAGFTSVGHSF

SEQ ID NO: 230 - DNA, 1129 bp, Arabidopsis thaliana
  misc_feature: Ceres CLONE ID no.26844
  misc_feature: Encodes the peptide sequence at SEQ ID NO. 231
aaaataatttgaaaggaatatgaatattccgttgaagaagacttgctcctgaaatcctttggaccgaaactcgtaaaattatttcccttcaatttctctgaaatctattcaccgtctcctttgtctcctcctccaaatcgatcgttcctcgtcgtcgtctgattttctctacgattgctttttctgtctagctcgataagaaaaaacaaaactaatttttgaagagtttttttttttgggtttgggagcgatgggtcaagcttttcgtaagctattcgatactttcttcggcaatcaagaaatgagggtcgttatgctggggctggatgctgctggcaaaacaactattctctacaagcttcatattggggaagttttgtctactgttcccaccattggattcaatgttgagaaagttcagtacaagaatgtgatgttcacagtttgggatgttggtggccaagagaaactgagacctctttggaggcattacttcaataatactgatggacttatatacgtggtggattccttagatcgagagaggatcgggaaagcaaagcaagaatttcaggagatcataaaagacccattcatgctaaacagtatcattctggtgtttgcaaacaaacaggacatgagaggagccatgtcaccgagagaagtatgtgaagggttaggcttatttgatctcaagaacaggaaatggcacatacaaggtacttgtgctcttcgtggagacgggctttatgaaggcttggactggttatcatctactcttaaggatgttaaagccgctggattcacatcggttggccactcgttttaaatcttccaggtatactttgatatcaatggccagtgtcttcttcttggctttatcacgaaatcagaatctctgaagactttttttgttaaggaaagaatgatcttctcattgtggcaatattagactccattagactatttttgaattttgatcatgctgccatgaaagcttctttgtatattctgctgatgaagagttgtatcatctgaaaaaccttctctttggggtcatctttgtccgattaagactttggtagatgtatatacattccttcgaaatcatgatatatttttttatagc

SEQ ID NO: 231 - protein, 192 aa, Arabidopsis thaliana; identical to SEQ ID NO: 229
  misc_feature: Ceres CLONE ID no. 26844
  misc_feature: Score of 496.7 for HMM of FIGURE 9
  misc_feature (5)..(177): Pfam Name: Arf Pfam Description: ADP-ribosylation factor family
  misc_feature: Functional Homolog of  Ceres CLONE ID no. 316638 at SEQ ID NO. 98

SEQ ID NO: 232 - protein, 192 aa, Arabidopsis thaliana
  misc_feature: Public GI no. 15228464
  misc_feature: Score of 484.2 for HMM of FIGURE 9
  misc_feature (5)..(177): Pfam Name: Arf Pfam Description: ADP-ribosylation factor family
  misc_feature: Functional Homolog of  Ceres CLONE ID no. 316638 at SEQ ID NO. 98
MGQTFRKLFDTFFGNQEMRVVMLGLDAAGKTTILYKLHIGEVLSTVPTIGFNVEKVQYKNVIFTVWDVGGQEKLRPLWRHYFNNTDGLIYVVDSLDRERIGKAKQEFQDIIRDPFMLNSVILVFANKQDMRGAMSPREVCEGLGLLDLKNRKWHIQGTCALQGDGLYEGLDWLSATLKEVKAAGYSSVGPSF

SEQ ID NO: 233 - DNA, 1144 bp, Arabidopsis thaliana
  misc_feature: Ceres CLONE ID no.124385
  misc_feature: Encodes the peptide sequence at SEQ ID NO. 234
aacctttgctttcttgggaaactctctgcaattcctggagaaatcgaccatcatcatcttagctttgattctctctgtgtttcttcactttcaatttctgttttggtttatcgataagagaaagtaaaattcgtctgtgggggtttaagcttttttggggtgagagatgggtcaaacttttcgcaagcttttcgataccttcttcggcaaccaggagatgagggtcgttatgctgggtctggatgcggctggcaaaacaacgatactgtacaagctccacataggagaagttctgtctactgttcccacaatcggtttcaatgttgagaaagttcagtacaagaatgtcatcttcacagtttgggatgttggtggccaagagaagctgaggcccttgtggaggcattacttcaataataccgatggacttatatacgtggtagactccttggaccgagagaggattggtaaagcgaagcaagaatttcaggatatcataagggacccattcatgctcaacagtgtcattctagtgtttgcaaacaaacaagacatgagaggagccatgtctcctcgagaagtatgtgaagggcttggcttacttgatctcaagaacaggaaatggcatatacaaggcacatgtgctcttcaaggagatgggctctatgaaggcttagactggttatccgctacactcaaagaggttaaagccgctggttactcatcagttggtccctcgttttagcacccctaccatttgcaaagaaaaaatccctgactagctaaattgacatacgaaagtaccaaatcaagctcatggtgtctcctgtctactcaccattatatactttacatccatggccacacccttcttcgtggccactgatatggtaatatcacaaaactaatgaaaatctctcaagactttgtaatggaagtgtttttgtttttctttcgtcttcacatggctctgcttcttaaagctaatgttagtatcaattaggctcctttttgcataatatgactttggagctttattgtaaattctgatggatacaaaatgtataaatctgacaaaaattgcaaaattctcatgagattattaaagtctcccttatagctatgatagatgattgatcttttt

SEQ ID NO: 234 - protein, 192 aa, Arabidopsis thaliana; identical to SEQ ID NO: 232
  misc_feature: Ceres CLONE ID no. 124385
  misc_feature: Score of 484.2 for HMM of FIGURE 9
  misc_feature (5)..(177): Pfam Name: Arf Pfam Description: ADP-ribosylation factor family
  misc_feature: Functional Homolog of  Ceres CLONE ID no. 316638 at SEQ ID NO. 98

SEQ ID NO: 235 - DNA, 910 bp, Glycine max
  misc_feature: Ceres CLONE ID no.707855
  misc_feature: Encodes the peptide sequence at SEQ ID NO. 236
aattcaaagtattgtttgttttttgtttgttggtgcttacaccgggagaagaaagttcttggaaggaaggaagaagccaaaaggcaaagagacaccggcaccggcatgggtcaagcttttcggaagctatttgacaccttctttggcaacaccgagatgagggttgtgatgcttggtcttgatgctgctggcaaaacaactatactttacaagcttcacattggagaagttttatccactgttcctacaattggtttcaatgtggagaaagttcagtataaaaatgttattttcacagtttgggatgttggaggacaagagaaactaaggccactttggaggcactattttaacaacacagatggcctgatttatgttgttgatagcttggatcgtgagagaataggtaaagcaaagcaggaatttcagacaatcataaatgacccatttatgctcaatagtgtcatcttggtgtttgccaacaaacaagacctgagaggggcgatgacgccaatggaagtatgtgaaggactaggtctctttgatctaaagaatagaaaatggcacatacatggcacttgtgcactcaagggagatggtctttatgagggcctggactggttggcttcaacactgaaggaaagaaaagctgctggatactcttcaataggaacctcatccttctaatctaggtattttgtcattgaggaacgtgcagggtttggccagtttcattcaaggatgttgtaaaaaagtaatcaaattttttgagttacatttcgttacctctacagctgatgaattatatagatgctttgactttcaaggtgcttagatatgactttgcagtgtatagaagtttgggcatgatgaatgaaaatgaatttgagacccaaaaaaaaaaaaaaaa

SEQ ID NO: 236 - protein, 193 aa, Glycine max
  misc_feature: Ceres CLONE ID no. 707855
  misc_feature: Score of 503.1 for HMM of FIGURE 9
  misc_feature (5)..(177): Pfam Name: Arf Pfam Description: ADP-ribosylation factor family
  misc_feature: Functional Homolog of  Ceres CLONE ID no. 316638 at SEQ ID NO. 98
MGQAFRKLFDTFFGNTEMRVVMLGLDAAGKTTILYKLHIGEVLSTVPTIGFNVEKVQYKNVIFTVWDVGGQEKLRPLWRHYFNNTDGLIYVVDSLDRERIGKAKQEFQTIINDPFMLNSVILVFANKQDLRGAMTPMEVCEGLGLFDLKNRKWHIHGTCALKGDGLYEGLDWLASTLKERKAAGYSSIGTSSF

SEQ ID NO: 237 - DNA, 1196 bp, Triticum aestivum
  misc_feature: Ceres CLONE ID no.757222
  misc_feature: Encodes the peptide sequence at SEQ ID NO. 238
caggccgggcgttgcaacgaacaaacaaacgctgctttcagaagaagggttcttccttctccactccttgtattccgtcacacgagtccgacggcgacgacgacttgagggagaaggcgaagaggaaggaaggcggactcgagaggttcgacggggattttggtgttcgtccggcggattcccagcgatcggccgatcctcgccggcggatggggcaggcgttccgcaaactgttcgatgccttcttcggcaacagcgagatgagggtcgtgatgcttgggctggatgccgcgggcaagaccaccatcctgtacaagctgcacatcggggaggtcctctcgactgtccctacgattgggttcaatgttgagaaagttcagtacaagaacgtgctgtttacagtgtgggatgttggtggccaggagaagttgaggcccttgtggagacattactttaataacacagatggcttgatctacgtggttgattcattggatagggagagaattggaaaagccaaagcagagtttcagacaataatcaacgatcctttcatgcttaacagtgtcatattggtatttgccaataaacaagatatgaaaggggcgatgacaccaatggaggtgtgcgaaggccttggcctctatgatttgaagaaccgcgtctggcacatccaagtatgagggcttggactggctgtcaagtactctgcaggatctgcaagcgttcggtcgcctaccctcaggagggacctaacagttctaagtagcacttctgcttataagatcctaatgctcatactaacaacctttggatgaaagatgacactcagagagaaagaaaaagatagtggtgagaaacacatccaggttttgcgataagctttggtgttgattctgctgaagaaaagactttgcttgggtctgaccacatcaaatttaccagtacaatcttgtcatggatagtgtggattctctaattcgtgacatatttcatgtaaaatttcctgtgagtttagaggagctaaccatcttatgcttttgttcacatatgaggagtggaacataatgttattgatgtaaattttctgtaagataattttggcacatacgatccgtatctagacaaaagaattttgggacggagggagtacaatttatgtctcccttgccccccccccaaaaaaaaaaaaaaaa

SEQ ID NO: 238 - protein, 157 aa, Triticum aestivum
  misc_feature: Ceres CLONE ID no. 757222
  misc_feature: Score of 395.2 for HMM of FIGURE 9
  misc_feature (5)..(156): Pfam Name: Arf Pfam Description: ADP-ribosylation factor family
  misc_feature: Functional Homolog of  Ceres CLONE ID no. 316638 at SEQ ID NO. 98
MGQAFRKLFDAFFGNSEMRVVMLGLDAAGKTTILYKLHIGEVLSTVPTIGFNVEKVQYKNVLFTVWDVGGQEKLRPLWRHYFNNTDGLIYVVDSLDRERIGKAKAEFQTIINDPFMLNSVILVFANKQDMKGAMTPMEVCEGLGLYDLKNRVWHIQV

SEQ ID NO: 239 - DNA, 897 bp, Zea mays
  misc_feature: Ceres CLONE ID no.1545342
  misc_feature: Encodes the peptide sequence at SEQ ID NO. 240
gttctcaccgcattgtcgagaaacttctattttcgtcacaaggctattccgttccgagagccaaaaactccactgctttcatcaactccggcgacttggagaatacgaagttccagaatccgatcggaagtttggtgctcgcgccttgacggattgatttcggtgcgccgatggggcaggcgttccgcaagctgttcgatgccttcttcggcaccagcgagatgagggttgtgatgcttggtctggatgccgccggtaaaaccaccatattgtacaagctgcatatcggggaggttttgtcgactgttcccacgattggtttcaacgtcgagaaagttcaatacaagaatgtgatgtttactgtgtgggatgttggtggccaagaaaagttgaggcccttgtggaggcactacttcaacaatactgatggcctgatctacgtagttgattcgttggatcgggagagaattggaaaagccaaagctgaatttcaggcaataatcaaagatcctttgatgcttaacagtgtaatactggtacttgccaataagcaagatatgaaaggggcaatgacaccaatggaggtgtgtgagggttttggcctttacgatttgaagaaccgcatytggcacattcaagggttttgtggggttaaaggtgatggcctttatgagggsttggactgggtggcaagcacmctgaaggaattgcaaggttcaggttgcctaccttttggagggamattgttgttttaagtagcaagcctgcctgtaagatcctttgggtgatagcagtaataatggatcaagagggtttttttttgtcawggatytgtamtyatcccttgggattttttgtcagtgatttaacctatgawawagatcttgtaaattttgt

SEQ ID NO: 240 - protein, 194 aa, Zea mays
  misc_feature: Ceres CLONE ID no. 1545342
  misc_feature: Score of 483.8 for HMM of FIGURE 9
  misc_feature (5)..(177): Pfam Name: Arf Pfam Description: ADP-ribosylation factor family
  misc_feature: Functional Homolog of  Ceres CLONE ID no. 316638 at SEQ ID NO. 98
  misc_feature (152)..(152): Xaa is any aa, unknown, or other
  misc_feature (169)..(169): Xaa is any aa, unknown, or other
  misc_feature (176)..(176): Xaa is any aa, unknown, or other
  misc_feature (191)..(191): Xaa is any aa, unknown, or other
MGQAFRKLFDAFFGTSEMRVVMLGLDAAGKTTILYKLHIGEVLSTVPTIGFNVEKVQYKNVMFTVWDVGGQEKLRPLWRHYFNNTDGLIYVVDSLDRERIGKAKAEFQAIIKDPLMLNSVILVLANKQDMKGAMTPMEVCEGFGLYDLKNRXWHIQGFCGVKGDGLYEXLDWVASXLKELQGSGCLPFGGXLLF

SEQ ID NO: 241 - DNA, 1171 bp, Zea mays
  misc_feature: Ceres CLONE ID no.275632
  misc_feature: Encodes the peptide sequence at SEQ ID NO. 242
aggccagcgcgaatccgccgtcctggtttccacggccgcaccgcaccctacctctcgtcgtcttgccgccgatcctttttccgaaacctagctcgcccgcccgacctccgaccttctagaaccttgcctccgaggtgccgccctccccgccccgcctgcgccgcttgctcatcgcttctctccccgcggcggcctcccagatccggttggatcgaggggcaaggtcaagagatggggcaggccttccgaaagctgtttgatgccttcttcggcaacaaggagatgcgggtggtgatgcttgggttggatgcagctgggaaaaccaccatactctataagcttcacattggtgaagttctctccactgtccctaccataggtttcaatgttgagaaggttcaatacaagaatgtagtgttcaccgtgtgggatgttggtggccaggagaagctcaggcccctgtggaggcactacttcaacaacactgatgctctgatttacgtggttgattcactggatagagagagaatcgggagagccagggcggagtttcaggctataatcaatgacccttttatgcttaacagtgtgttattggtgtttgctaacaagcaagacatgaggggagcaatgactccgatggaagtgtgtgagggccttgggctgtatgacctgacgaaccgcatctggcacatccagggcacctgtgctctaaaaggcgatggcctgtatgaagggttggactggctagcgactactctggacgaaatgcgtgcctctggacggttaacctcagcatcatcatcggcatcctgaatcacgtgtaacaggagggacaaacgatttgatcctcgtgatacgcccattgaaggatcatcttgtgattcaggctttgcgcgctttgttttcttttgtgtttccccaattgctgttggctatacatgtgtgctatgaactgggtggtgcatctggcaaggctaggtagtcagagttacagacgccggttccgtggtgacgatgtcagtacggtggtggtgtcgtactcgtctgctagtcggaagcaggcatcatcatccatctcgtcgcttgtgtgtgggagtgactgtaaatactaccactgatgacatggctctcgtggtttcttcgtctgaaactaaagaaacggaatcac

SEQ ID NO: 242 - protein, 194 aa, Zea mays
  misc_feature: Ceres CLONE ID no. 275632
  misc_feature: Score of 481.3 for HMM of FIGURE 9
  misc_feature (5)..(177): Pfam Name: Arf Pfam Description: ADP-ribosylation factor family
  misc_feature: Functional Homolog of  Ceres CLONE ID no. 316638 at SEQ ID NO. 98
MGQAFRKLFDAFFGNKEMRVVMLGLDAAGKTTILYKLHIGEVLSTVPTIGFNVEKVQYKNVVFTVWDVGGQEKLRPLWRHYFNNTDALIYVVDSLDRERIGRARAEFQAIINDPFMLNSVLLVFANKQDMRGAMTPMEVCEGLGLYDLTNRIWHIQGTCALKGDGLYEGLDWLATTLDEMRASGRLTSASSSAS

SEQ ID NO: 243 - DNA, 1161 bp, Zea mays
  misc_feature: Ceres CLONE ID no.306269
  misc_feature: Encodes the peptide sequence at SEQ ID NO. 244
aactcacaaggcttttacacgactagttctgcgaggctaagagcagaaaaaactccacctgcctggctgatttcatcaactccggcggcttggagaagacgaagctgctccagaatccgataggaagtttggtgctcgcgtgttgacgggttgatttcggtgcgccgatggggcaggcgttccgcaagctgttcgatgccttcctcggcaccagcgagatgagggttgtgatgcttggtctggatgccgccggtaaaaccaccatcttgtacaagctgcaaatcggggaggttttgtcgactgttcccacgattggtttcaatgtcgagaaagttcaatacaagaatgtgatgtttactgtttgggatgttggtggccaagaaaagttgaggcccttgtggaggcactacttcaacaatactgatggcttgatctatgtagttgattcattggatcgggagaggattggaaaagctaaagctgaatttcaggcaataatcaatgatcctttcatgcttaacagtgtcatattggtatttgccaataaacaagatatgaaaggggcaatgacaccaatggaggtgtgtgagggccttggcctctacgatttgaagaatcgcacctggcacatccaaggctcctgtgcgcttaaaggtgatggcctttatgagggcttggactggatggcaagcactctgaaggaattgcaagcttcaggtcgcctaccctctggagggacatcgttgttctaagaagcaaatctgcatgtaagatccttgggttgatactagtaataatggatcaagagatcatcaatgatgttaacatcttgatgagaatttcctttcaaattcatgctgcactgctcaggctccgtggggtgattctactaaagaaaaggtgaaacatgggcctgaccgcataaaaatatcggtcatgcgtttgtactcacccctggggatttcttgtcaatgatctaacctgtgatataggccttgtaacttccgttgtgagtaagtttcattcaaagctaaccggcggatgcatttgtcacatatgagaattgaggagtcaacttccacatcctgttgttgtaagaatttctgtaaatcgaagttggcaaacataatttatctcaacaagttggtccggtcattatcc

SEQ ID NO: 244 - protein, 194 aa, Zea mays
  misc_feature: Ceres CLONE ID no. 306269
  misc_feature: Score of 486.8 for HMM of FIGURE 9
  misc_feature (5)..(177): Pfam Name: Arf Pfam Description: ADP-ribosylation factor family
  misc_feature: Functional Homolog of  Ceres CLONE ID no. 316638 at SEQ ID NO. 98
MGQAFRKLFDAFLGTSEMRVVMLGLDAAGKTTILYKLQIGEVLSTVPTIGFNVEKVQYKNVMFTVWDVGGQEKLRPLWRHYFNNTDGLIYVVDSLDRERIGKAKAEFQAIINDPFMLNSVILVFANKQDMKGAMTPMEVCEGLGLYDLKNRTWHIQGSCALKGDGLYEGLDWMASTLKELQASGRLPSGGTSLF

SEQ ID NO: 245 - DNA, 1156 bp, Zea mays
  misc_feature: Ceres CLONE ID no.295292
  misc_feature: Encodes the peptide sequence at SEQ ID NO. 246
gaccaaccccacccactggaccggcccgcgcccgcttggtccagcgccggccctgcctgcagccagccaccgttgtccgttccctcccgcgatccactcctctcgagctctaggggacggaaggaatccggcgggggtggggtgcgagcagggggagggagaagagcagccgcccgccccgcgagggggcaacagctgcccaagaacctgaccggaagagttgtgggagcggcggcggaaagatggggcaggccctgcgcaggctcttcgactccttcttctccaccagggagatgagggttgtgatgcttggtctggatgcagctggtaaaacaacaatactgtacaggcttcacatgggagaggttctttcaacagtccctacagtcggttttaatgtcgagaaggttcagtataagaatgtggcattcactgtgtgggatgtgggtgggcaagaaaaactcaggtcactgtggaagatgtacctgagtaattctgatgcactgatctatgtcgttgattctctggacagagaaaggatcagagacgcgaggcaagagttccagaccattatcaaggaccctttgatggcaaacagcataatcttggtatttgcaaacaaacaggacctgagaggcacgatgagcacggacgaggtcagcgaagggctggggctgcacgacctcaggaacaggatctggcacatacaggggacccttgcgcgctccgcggcgagggcctctacgacgggctcgactggcttgcgtccaccctgaagcagctgcaagaatcgggccacgcgacttcggtcgctggcccttcccatctgatccagcgcaagtgagctcagtgcctcagccaactgacagcaagcccacaagaatatgctccagcgcgagcgcattcctttggtgggtgtggctgcccgctggtggtggtggagttccttcggtcggtgttgccgtgttggtatcatatgagccagttgttcatccggcagggactcgcgtacttttttttctctcctgagattgtttgtaaattgttgaacggatgcaatgccggcgatgttgatcttgtgtgctggtggtgcacgtggttgttttgtctacttttttttacaataaaaaagagatcgtctgcggttctggtgatt

SEQ ID NO: 246 - protein, 177 aa, Zea mays
  misc_feature: Ceres CLONE ID no. 295292
  misc_feature: Score of 336.3 for HMM of FIGURE 9
  misc_feature (5)..(162): Pfam Name: Arf Pfam Description: ADP-ribosylation factor family
  misc_feature: Functional Homolog of  Ceres CLONE ID no. 316638 at SEQ ID NO. 98
MGQALRRLFDSFFSTREMRVVMLGLDAAGKTTILYRLHMGEVLSTVPTVGFNVEKVQYKNVAFTVWDVGGQEKLRSLWKMYLSNSDALIYVVDSLDRERIRDARQEFQTIIKDPLMANSIILVFANKQDLRGTMSTDEVSEGLGLHDLRNRIWHIQGTLARSAARASTTGSTGLRPP

SEQ ID NO: 247 - DNA, 1978 bp, Panicum virgatum
  misc_feature: Ceres CLONE ID no.1860083
  misc_feature: Encodes the peptide sequence at SEQ ID NO. 248
cctcgtccttgccgccgccgatccttccccaaaacctagcccgcccgccctcggggccttctagaaccttccatccggggcgccgcgcctccccgtcgccgaccccgccctctcttcgcccccgcaccctcccgcgcggcggcctcgcagatccggttggatcgagggcgcagaaggctccggtcgggggcacagctcgcccagcccgaggccaggagatggggcaggcgttccggaagctcttcgatgccttcttcggcaacaaggagatgcgggtggtgatgcttgggttggatgcagctggaaaaaccaccatactctataagctgcacattggcgaagttctctccaccgtccctaccatcggcttcaatgttgagaaggttcagtacaagaatgtagttttcactgtgtgggatgtcggcggccaggagaaactgaggcccttgtggaggcactacttcaccaatacagatgctctggtcatttattctcatttctgtttctctagcagcataaaattaaaatctattcacagtaacaatttaacatggagctgcttgttccatattgtttgttccactttgttctcccgcttctaatttagtatttgtagttcagtttgcaaatccagtaccactcgcaagaataggtcaactgacttcattgttgtggattcataacttgagcctattttgccctctgagcctattttactttggcatatttattggtcttgatggtcttacttagtgaaaccagaaagagtaatattgccgtaagtaagctcatggtttgtagctgtcaagatcttcatgaattatgctatagctcaaccttggtttatttacttggcattgatttgtagtagagactggtttcttgaaatctatgaccgtcctcattatttgcttaatttgcagatttacgtggttgattcactggatagagagagaatcgggagagccagagcagagtttcaggctataatcaatgacccttttatgcttaacagtgtacttttggtgtttgctaacaagcaagatatggtatgttagcaatgctttctctcaaacctttgttttatattgtgattttttctaatggaaatgtgcgttgtttctgaactccttgaatttttctgtccaaaatcatggttttccctgtttgagcatggttctttgtgtgtgcatgtaatgttaatgaataaggttcatccatatgtatacacctgcaaattctcatccttgccaaagtctgcggccatgcccatgactgttctgacaatagctgccctgtgtttcattttgaacagaaggtgtcaatatgttggctgtctgtttgtttgttttaacataaagtttgcagggtatgtgtttcacgttgtttaacatccttcatgctatgatagtatttggagtctgttatatctatggtattttcgtttttacccaactgttgctcactctggtgatgcgcctgttaatgcagaggggagcaatgaccccgatggaggtgtgcgagggcctcgggctgtacgacctgactaaccgcgtctggcacatccagggcacatgtgctctgaaaggagatggcctgtatgaagggctggactggctagcgactaccctggacgaaatgcgagcctctggacggataacctcaacatcatcatcctgaaactacatgtaacaggacgaacagaaatttgatcctcgtgattgatcctcgtgatacgcccattgaaggatcatctcgcgattcaggccatgcgcttgcactctttgtttccttattttcatgtttccccaattgctggttggctattccagctatggagtatggactgggtgatgcatctggcaaccctaggttggcagagttgtagtaagtaccggtcggcgatatggtggtgttggtggtgatttgcgtttggaagaaagggtaggggtggtgttaaaaaaaaaaaaaaaaaaaa

SEQ ID NO: 248 - protein, 127 aa, Panicum virgatum
  misc_feature: Ceres CLONE ID no. 1860083
  misc_feature: Score of 263.6 for HMM of FIGURE 9
  misc_feature (5)..(89): Pfam Name: Arf Pfam Description: ADP-ribosylation factor family
  misc_feature: Functional Homolog of  Ceres CLONE ID no. 316638 at SEQ ID NO. 98
MGQAFRKLFDAFFGNKEMRVVMLGLDAAGKTTILYKLHIGEVLSTVPTIGFNVEKVQYKNVVFTVWDVGGQEKLRPLWRHYFTNTDALVIYSHFCFSSSIKLKSIHSNNLTWSCLFHIVCSTLFSRF

SEQ ID NO: 249 - protein, 196 aa, Oryza sativa subsp. indica
  misc_feature: Public GI no. 125537931
  misc_feature: Score of 296.4 for HMM of FIGURE 9
  misc_feature (5)..(130): Pfam Name: Arf Pfam Description: ADP-ribosylation factor family
  misc_feature: Functional Homolog of  Ceres CLONE ID no. 316638 at SEQ ID NO. 98
MGQALRRLFDAFFSTREMRVVMLGLDAAGKTTILYRLHMGEVLSTVPTVGFNVEKVQYKNVVFTVWDVGGQEKLRPLWKMYLSNSDALIYVVDSLDRERIIDARQEFQTIIKDPLMANSIILVFANKQDLLPLTLPVLFPPEMPMPQLVNQSDAPGQSSFCSSNENIEFLGACVIFAIGFLGVAARRGGHSIAVFI

SEQ ID NO: 250 - protein, 194 aa, Oryza sativa subsp. japonica
  misc_feature: Public GI no. 41052966
  misc_feature: Score of 489.9 for HMM of FIGURE 9
  misc_feature (5)..(177): Pfam Name: Arf Pfam Description: ADP-ribosylation factor family
  misc_feature: Functional Homolog of  Ceres CLONE ID no. 316638 at SEQ ID NO. 98
MGQAFRKLFDAFFGTSEMRVVMLGLDAAGKTTILYKLHIGEVLSTVPTIGFNVEKVQYKNVMFTVWDVGGQEKLRPLWRHYFNNTDGLIYVVDSLDRERIGKAKAEFQAIVNDPLMLNSVILVFANKQDMKGAMTPLEVCEGLGLYDLKNRIWHIQGSCALKGDGLYEGLDWLASTLKGLEASGRLPSGGTSLF

SEQ ID NO: 251 - protein, 124 aa, Oryza sativa subsp. japonica
  misc_feature: Public GI no. 115448099
  misc_feature: Score of 195.7 for HMM of FIGURE 9
  misc_feature (5)..(89): Pfam Name: Arf Pfam Description: ADP-ribosylation factor family
  misc_feature: Functional Homolog of  Ceres CLONE ID no. 316638 at SEQ ID NO. 98
MGQAFRKLFDAFFGTSEMRVVMLGLDAAGKTTILYKLHIGEVLSTVPTIGFNVEKVQYKNVMFTVWDVGGQEKLRPLWRHYFNNTDGLVCFVSFVVIFLGIRERFVHRCIKEGKKWLFDFDRLV

SEQ ID NO: 252 - protein, 192 aa, Oryza sativa subsp. japonica
  misc_feature: Public GI no. 115483682
  misc_feature: Score of 474.5 for HMM of FIGURE 9
  misc_feature (5)..(177): Pfam Name: Arf Pfam Description: ADP-ribosylation factor family
  misc_feature: Functional Homolog of  Ceres CLONE ID no. 316638 at SEQ ID NO. 98
MGQAFRKLFDAFFGNKEMRVVMLGLDAAGKTTILYKLHIGEVLSTVPTIGFNVEKVQYKNVVFTVWDVGGQEKLRPLWRHYFNNTDALIYVVDSLDRERIGRARAEFQAIINDPFMLNSVLLVFANKQDMRGAMTPMEVCEGLGLYDLNNRIWHIQGTCALKGDGLYEGLDWLATTLDEMRASGRITSTSSS

SEQ ID NO: 253 - protein, 135 aa, Oryza sativa subsp. japonica
  misc_feature: Public GI no. 78709066
  misc_feature: Score of 305.3 for HMM of FIGURE 9
  misc_feature (5)..(130): Pfam Name: Arf Pfam Description: ADP-ribosylation factor family
  misc_feature: Functional Homolog of  Ceres CLONE ID no. 316638 at SEQ ID NO. 98
MGQAFRKLFDAFFGNKEMRVVMLGLDAAGKTTILYKLHIGEVLSTVPTIGFNVEKVQYKNVVFTVWDVGGQEKLRPLWRHYFNNTDALIYVVDSLDRERIGRARAEFQAIINDPFMLNSVLLVFANKQDMCRGAQ

SEQ ID NO: 254 - protein, 113 aa, Oryza sativa subsp. japonica; identical to SEQ ID NO: 99
  misc_feature: Public GI no. 110289664
  misc_feature: Score of 231.5 for HMM of FIGURE 9
  misc_feature (5)..(108): Pfam Name: Arf Pfam Description: ADP-ribosylation factor family
  misc_feature: Functional Homolog of  Ceres CLONE ID no. 316638 at SEQ ID NO. 98

SEQ ID NO: 255 - protein, 194 aa, Oryza sativa subsp. japonica
  misc_feature: Public GI no. 115443985
  misc_feature: Score of 410.5 for HMM of FIGURE 9
  misc_feature (5)..(177): Pfam Name: Arf Pfam Description: ADP-ribosylation factor family
  misc_feature: Functional Homolog of  Ceres CLONE ID no. 316638 at SEQ ID NO. 98
MGQALRRLFDAFFSTREMRVVMLGLDAAGKTTILYRLHMGEVLSTVPTVGFNVEKVQYKNVVFTVWDVGGQEKLRPLWKMYLSNSDALIYVVDSLDRERIIDARQEFQTIIKDPLMANSIILVFANKQDLRGAMSPDEVSEGLGLHDLRNRIWHIQGTCALRGEGLYDGLDWLASTLKQLQETGHATSVAGPSI

SEQ ID NO: 256 - protein, 217 aa, Oryza sativa subsp. japonica
  misc_feature: Public GI no. 125580669
  misc_feature: Score of 364.7 for HMM of FIGURE 9
  misc_feature (5)..(162): Pfam Name: Arf Pfam Description: ADP-ribosylation factor family
  misc_feature: Functional Homolog of  Ceres CLONE ID no. 316638 at SEQ ID NO. 98
MGQALRRLFDAFFSTREMRVVMLGLDAAGKTTILYRLHMGEVLSTVPTVGFNVEKVQYKNVVFTVWDVGGQEKLRPLWKMYLSNSDALIYVVDSLDRERIIDARQEFQTIIKDPLMANSIILVFANKQDLRGAMSPDEVSEGLGLHDLRNRIWHIQGTCALREMPMPQLVNQSDAPGQSSFCSSNENIEFLGACVIFAIGFLGVAARRGGHSIAVFI

SEQ ID NO: 257 - protein, 189 aa, Oryza sativa subsp. japonica
  misc_feature: Public GI no. 7248402
  misc_feature: Score of 368.6 for HMM of FIGURE 9
  misc_feature (1)..(177): Pfam Name: Arf Pfam Description: ADP-ribosylation factor family
  misc_feature: Functional Homolog of  Ceres CLONE ID no. 316638 at SEQ ID NO. 98
MGQSLRKLFDSFCTKEMKVLMLGLDAAGKTTILYRLHIGEVLSSIPTIGFNVEKVEYKNVAFTVWDVGGQDKLRPLWRQYFRNADALIYVVDSMDRERIGVAKEEFQAIIRDPLMLNSVILLLANKQDLKGAMSSSEVCQRLGAYEELKNRRWHCQGASALTGDGLHGGLDWLASTLRDVQTWGTSVRF

SEQ ID NO: 258 - DNA, 1330 bp, Artificial Sequence; identical to SEQ ID NO: 225
  misc_feature: Truncated Version Of Ceres CLONE ID no.1929841
  misc_feature: Encodes the peptide sequence at SEQ ID NO. 259

SEQ ID NO: 259 - protein, 75 aa, Artificial Sequence
  misc_feature: Truncated Version Of Ceres CLONE ID no. 1929841
  misc_feature: Score of 226.3 for HMM of FIGURE 8
  misc_feature (5)..(75): Pfam Name: Arf Pfam Description: ADP-ribosylation factor family
  misc_feature: Functional Homolog of  Ceres CLONE ID no. 316638 at SEQ ID NO. 98
MGQAFRKLFDTFFGNSEMRVVMLGLDAAGKTTILYKLHIGEVLSTVPTIGFNVEKVQYKNVMFTVWDVGGQEKLR

SEQ ID NO: 260 - DNA, 411 bp, Artificial Sequence; identical to SEQ ID NO: 227
  misc_feature: Truncated Version Of Ceres ANNOT ID no.1470444
  misc_feature: Encodes the peptide sequence at SEQ ID NO. 261

SEQ ID NO: 261 - protein, 75 aa, Artificial Sequence
  misc_feature: Truncated Version Of Ceres ANNOT ID no. 1470444
  misc_feature: Score of 223.9 for HMM of FIGURE 8
  misc_feature (5)..(75): Pfam Name: Arf Pfam Description: ADP-ribosylation factor family
  misc_feature: Functional Homolog of  Ceres CLONE ID no. 316638 at SEQ ID NO. 98
MGQAFRKLFDTFFGNTEMRVVMLGLDAAGKTTILYKLHIGEVLSTVPTIGFNVEKVQYKNVVFTVWDVGGQEKLR

SEQ ID NO: 262 - protein, 75 aa, Artificial Sequence
  misc_feature: Truncated Version Of Public GI no. 15237901
  misc_feature: Score of 225.6 for HMM of FIGURE 8
  misc_feature (5)..(75): Pfam Name: Arf Pfam Description: ADP-ribosylation factor family
  misc_feature: Functional Homolog of  Ceres CLONE ID no. 316638 at SEQ ID NO. 98
MGQAFRKLFDTFFGNQEMRVVMLGLDAAGKTTILYKLHIGEVLSTVPTIGFNVEKVQYKNVMFTVWDVGGQEKLR

SEQ ID NO: 263 - DNA, 1129 bp, Artificial Sequence; identical to SEQ ID NO: 230
  misc_feature: Truncated Version Of Ceres CLONE ID no.26844
  misc_feature: Encodes the peptide sequence at SEQ ID NO. 264

SEQ ID NO: 264 - protein, 75 aa, Artificial Sequence; identical to SEQ ID NO: 262
  misc_feature: Truncated Version Of Ceres CLONE ID no. 26844
  misc_feature: Score of 225.6 for HMM of FIGURE 8
  misc_feature (5)..(75): Pfam Name: Arf Pfam Description: ADP-ribosylation factor family
  misc_feature: Functional Homolog of  Ceres CLONE ID no. 316638 at SEQ ID NO. 98

SEQ ID NO: 265 - protein, 75 aa, Artificial Sequence
  misc_feature: Truncated Version Of Public GI no. 15228464
  misc_feature: Score of 221.2 for HMM of FIGURE 8
  misc_feature (5)..(75): Pfam Name: Arf Pfam Description: ADP-ribosylation factor family
  misc_feature: Functional Homolog of  Ceres CLONE ID no. 316638 at SEQ ID NO. 98
MGQTFRKLFDTFFGNQEMRVVMLGLDAAGKTTILYKLHIGEVLSTVPTIGFNVEKVQYKNVIFTVWDVGGQEKLR

SEQ ID NO: 266 - DNA, 1144 bp, Artificial Sequence; identical to SEQ ID NO: 233
  misc_feature: Truncated Version Of Ceres CLONE ID no.124385
  misc_feature: Encodes the peptide sequence at SEQ ID NO. 267

SEQ ID NO: 267 - protein, 75 aa, Artificial Sequence; identical to SEQ ID NO: 265
  misc_feature: Truncated Version Of Ceres CLONE ID no. 124385
  misc_feature: Score of 221.2 for HMM of FIGURE 8
  misc_feature (5)..(75): Pfam Name: Arf Pfam Description: ADP-ribosylation factor family
  misc_feature: Functional Homolog of  Ceres CLONE ID no. 316638 at SEQ ID NO. 98

SEQ ID NO: 268 - DNA, 910 bp, Artificial Sequence; identical to SEQ ID NO: 235
  misc_feature: Truncated Version Of Ceres CLONE ID no.707855
  misc_feature: Encodes the peptide sequence at SEQ ID NO. 269

SEQ ID NO: 269 - protein, 75 aa, Artificial Sequence
  misc_feature: Truncated Version Of Ceres CLONE ID no. 707855
  misc_feature: Score of 224.2 for HMM of FIGURE 8
  misc_feature (5)..(75): Pfam Name: Arf Pfam Description: ADP-ribosylation factor family
  misc_feature: Functional Homolog of  Ceres CLONE ID no. 316638 at SEQ ID NO. 98
MGQAFRKLFDTFFGNTEMRVVMLGLDAAGKTTILYKLHIGEVLSTVPTIGFNVEKVQYKNVIFTVWDVGGQEKLR

SEQ ID NO: 270 - DNA, 1196 bp, Artificial Sequence; identical to SEQ ID NO: 237
  misc_feature: Truncated Version Of Ceres CLONE ID no.757222
  misc_feature: Encodes the peptide sequence at SEQ ID NO. 271

SEQ ID NO: 271 - protein, 75 aa, Artificial Sequence
  misc_feature: Truncated Version Of Ceres CLONE ID no. 757222
  misc_feature: Score of 225.2 for HMM of FIGURE 8
  misc_feature (5)..(75): Pfam Name: Arf Pfam Description: ADP-ribosylation factor family
  misc_feature: Functional Homolog of  Ceres CLONE ID no. 316638 at SEQ ID NO. 98
MGQAFRKLFDAFFGNSEMRVVMLGLDAAGKTTILYKLHIGEVLSTVPTIGFNVEKVQYKNVLFTVWDVGGQEKLR

SEQ ID NO: 272 - DNA, 897 bp, Artificial Sequence; identical to SEQ ID NO: 239
  misc_feature: Truncated Version Of Ceres CLONE ID no.1545342
  misc_feature: Encodes the peptide sequence at SEQ ID NO. 273

SEQ ID NO: 273 - protein, 75 aa, Artificial Sequence
  misc_feature: Truncated Version Of Ceres CLONE ID no. 1545342
  misc_feature: Score of 224.5 for HMM of FIGURE 8
  misc_feature (5)..(75): Pfam Name: Arf Pfam Description: ADP-ribosylation factor family
  misc_feature: Functional Homolog of  Ceres CLONE ID no. 316638 at SEQ ID NO. 98
MGQAFRKLFDAFFGTSEMRVVMLGLDAAGKTTILYKLHIGEVLSTVPTIGFNVEKVQYKNVMFTVWDVGGQEKLR

SEQ ID NO: 274 - DNA, 1171 bp, Artificial Sequence; identical to SEQ ID NO: 241
  misc_feature: Truncated Version Of Ceres CLONE ID no.275632
  misc_feature: Encodes the peptide sequence at SEQ ID NO. 275

SEQ ID NO: 275 - protein, 75 aa, Artificial Sequence
  misc_feature: Truncated Version Of Ceres CLONE ID no. 275632
  misc_feature: Score of 224.2 for HMM of FIGURE 8
  misc_feature (5)..(75): Pfam Name: Arf Pfam Description: ADP-ribosylation factor family
  misc_feature: Functional Homolog of  Ceres CLONE ID no. 316638 at SEQ ID NO. 98
MGQAFRKLFDAFFGNKEMRVVMLGLDAAGKTTILYKLHIGEVLSTVPTIGFNVEKVQYKNVVFTVWDVGGQEKLR

SEQ ID NO: 276 - DNA, 1161 bp, Artificial Sequence; identical to SEQ ID NO: 243
  misc_feature: Truncated Version Of Ceres CLONE ID no.306269
  misc_feature: Encodes the peptide sequence at SEQ ID NO. 277

SEQ ID NO: 277 - protein, 75 aa, Artificial Sequence
  misc_feature: Truncated Version Of Ceres CLONE ID no. 306269
  misc_feature: Score of 215.6 for HMM of FIGURE 8
  misc_feature (5)..(75): Pfam Name: Arf Pfam Description: ADP-ribosylation factor family
  misc_feature: Functional Homolog of  Ceres CLONE ID no. 316638 at SEQ ID NO. 98
MGQAFRKLFDAFLGTSEMRVVMLGLDAAGKTTILYKLQIGEVLSTVPTIGFNVEKVQYKNVMFTVWDVGGQEKLR

SEQ ID NO: 278 - DNA, 1156 bp, Artificial Sequence; identical to SEQ ID NO: 245
  misc_feature: Truncated Version Of Ceres CLONE ID no.295292
  misc_feature: Encodes the peptide sequence at SEQ ID NO. 279

SEQ ID NO: 279 - protein, 75 aa, Artificial Sequence
  misc_feature: Truncated Version Of Ceres CLONE ID no. 295292
  misc_feature: Score of 202.9 for HMM of FIGURE 8
  misc_feature (5)..(75): Pfam Name: Arf Pfam Description: ADP-ribosylation factor family
  misc_feature: Functional Homolog of  Ceres CLONE ID no. 316638 at SEQ ID NO. 98
MGQALRRLFDSFFSTREMRVVMLGLDAAGKTTILYRLHMGEVLSTVPTVGFNVEKVQYKNVAFTVWDVGGQEKLR

SEQ ID NO: 280 - DNA, 1978 bp, Artificial Sequence; identical to SEQ ID NO: 247
  misc_feature: Truncated Version Of Ceres CLONE ID no.1860083
  misc_feature: Encodes the peptide sequence at SEQ ID NO. 281

SEQ ID NO: 281 - protein, 75 aa, Artificial Sequence; identical to SEQ ID NO: 275
  misc_feature: Truncated Version Of Ceres CLONE ID no. 1860083
  misc_feature: Score of 224.2 for HMM of FIGURE 8
  misc_feature (5)..(75): Pfam Name: Arf Pfam Description: ADP-ribosylation factor family
  misc_feature: Functional Homolog of  Ceres CLONE ID no. 316638 at SEQ ID NO. 98

SEQ ID NO: 282 - protein, 75 aa, Artificial Sequence
  misc_feature: Truncated Version Of Public GI no. 125537931
  misc_feature: Score of 205.4 for HMM of FIGURE 8
  misc_feature (5)..(75): Pfam Name: Arf Pfam Description: ADP-ribosylation factor family
  misc_feature: Functional Homolog of  Ceres CLONE ID no. 316638 at SEQ ID NO. 98
MGQALRRLFDAFFSTREMRVVMLGLDAAGKTTILYRLHMGEVLSTVPTVGFNVEKVQYKNVVFTVWDVGGQEKLR

SEQ ID NO: 283 - protein, 75 aa, Artificial Sequence; identical to SEQ ID NO: 273
  misc_feature: Truncated Version Of Public GI no. 41052966
  misc_feature: Score of 224.5 for HMM of FIGURE 8
  misc_feature (5)..(75): Pfam Name: Arf Pfam Description: ADP-ribosylation factor family
  misc_feature: Functional Homolog of  Ceres CLONE ID no. 316638 at SEQ ID NO. 98

SEQ ID NO: 284 - protein, 75 aa, Artificial Sequence; identical to SEQ ID NO: 273
  misc_feature: Truncated Version Of Public GI no. 115448099
  misc_feature: Score of 224.5 for HMM of FIGURE 8
  misc_feature (5)..(75): Pfam Name: Arf Pfam Description: ADP-ribosylation factor family
  misc_feature: Functional Homolog of  Ceres CLONE ID no. 316638 at SEQ ID NO. 98

SEQ ID NO: 285 - protein, 75 aa, Artificial Sequence; identical to SEQ ID NO: 275
  misc_feature: Truncated Version Of Public GI no. 115483682
  misc_feature: Score of 224.2 for HMM of FIGURE 8
  misc_feature (5)..(75): Pfam Name: Arf Pfam Description: ADP-ribosylation factor family
  misc_feature: Functional Homolog of  Ceres CLONE ID no. 316638 at SEQ ID NO. 98

SEQ ID NO: 286 - protein, 75 aa, Artificial Sequence; identical to SEQ ID NO: 275
  misc_feature: Truncated Version Of Public GI no. 78709066
  misc_feature: Score of 224.2 for HMM of FIGURE 8
  misc_feature (5)..(75): Pfam Name: Arf Pfam Description: ADP-ribosylation factor family
  misc_feature: Functional Homolog of  Ceres CLONE ID no. 316638 at SEQ ID NO. 98

SEQ ID NO: 287 - protein, 75 aa, Artificial Sequence; identical to SEQ ID NO: 275
  misc_feature: Truncated Version Of Public GI no. 110289664
  misc_feature: Score of 224.2 for HMM of FIGURE 8
  misc_feature (5)..(75): Pfam Name: Arf Pfam Description: ADP-ribosylation factor family
  misc_feature: Functional Homolog of  Ceres CLONE ID no. 316638 at SEQ ID NO. 98

SEQ ID NO: 288 - protein, 75 aa, Artificial Sequence; identical to SEQ ID NO: 282
  misc_feature: Truncated Version Of Public GI no. 115443985
  misc_feature: Score of 205.4 for HMM of FIGURE 8
  misc_feature (5)..(75): Pfam Name: Arf Pfam Description: ADP-ribosylation factor family
  misc_feature: Functional Homolog of  Ceres CLONE ID no. 316638 at SEQ ID NO. 98

SEQ ID NO: 289 - protein, 75 aa, Artificial Sequence; identical to SEQ ID NO: 282
  misc_feature: Truncated Version Of Public GI no. 125580669
  misc_feature: Score of 205.4 for HMM of FIGURE 8
  misc_feature (5)..(75): Pfam Name: Arf Pfam Description: ADP-ribosylation factor family
  misc_feature: Functional Homolog of  Ceres CLONE ID no. 316638 at SEQ ID NO. 98

SEQ ID NO: 290 - protein, 74 aa, Artificial Sequence
  misc_feature: Truncated Version Of Public GI no. 7248402
  misc_feature: Score of 179.7 for HMM of FIGURE 8
  misc_feature (1)..(74): Pfam Name: Arf Pfam Description: ADP-ribosylation factor family
  misc_feature: Functional Homolog of  Ceres CLONE ID no. 316638 at SEQ ID NO. 98
MGQSLRKLFDSFCTKEMKVLMLGLDAAGKTTILYRLHIGEVLSSIPTIGFNVEKVEYKNVAFTVWDVGGQDKLR

SEQ ID NO: 291 - DNA, 957 bp, Gossypium hirsutum
  misc_feature: Ceres CLONE ID no.1849534
  misc_feature: Encodes the peptide sequence at SEQ ID NO. 292
ctcaaatccatcagttttccctttttttagtctccaacttccatttctcttatccggattgatatcataaataccaaaatggcatgttctgatgaaacatcagcccagttagaacttatcaggcaacatctctttactgattttgcttccatggaaactccaccacccttctatcaactctcaaattccgagtcatctcatgtttatagcccgacccggttaaaacaatcgagtctcagccaacgtcgtccttctattaacgttatgatcccacccacaagttttaacataagcccaaacccggttccagattcggctgcggtggcggttgaatcatacgagaaaagtcattatagaggtgttagaagacgaccatgggggaagtttgcggctgaaattagagaccctaacaagaaaggggcaagggtttggcttggaacatttgacaccgccatagaagcggcaaaagcatatgatagagctgcctttaagctacgcggtagcaaagctatactgaattttcctcatgaagcaggaaaatcaaatttctcagagtcaggaaaaaggaggagaagtgtagaggaaggagaaggagaaaagagagtgagcctgctggagtgcaaagcagggagaagagaggaggaggtaacggtggcggaatgtggaacgccgtcgaatcagacggggatcggggataatgaagatataaatgaaatattcggtggcccactcttatcacccttatcatcgtttccatggtttgggtattccaggcttgaggttatgtaaaagcttagcaaggaatgtggctgtgtttactttttttaagtgtttggtaattagtagggatgggatgcctaaagcctaagcattttcagatcaaattgcatttgttctttcttctgtttactttaataaataaaattgtcttctcctcaaaaaaaaaaaaaaaaaaaa

SEQ ID NO: 292 - protein, 236 aa, Gossypium hirsutum
  misc_feature: Ceres CLONE ID no. 1849534
  misc_feature: Score of 174.3 for HMM of FIGURE 7
  misc_feature (90)..(142): Pfam Name: AP2 Pfam Description: AP2 domain
  misc_feature: Functional Homolog of  Ceres CLONE ID no. 641355 at SEQ ID NO. 110
MACSDETSAQLELIRQHLFTDFASMETPPPFYQLSNSESSHVYSPTRLKQSSLSQRRPSINVMIPPTSFNISPNPVPDSAAVAVESYEKSHYRGVRRRPWGKFAAEIRDPNKKGARVWLGTFDTAIEAAKAYDRAAFKLRGSKAILNFPHEAGKSNFSESGKRRRSVEEGEGEKRVSLLECKAGRREEEVTVAECGTPSNQTGIGDNEDINEIFGGPLLSPLSSFPWFGYSRLEVM

SEQ ID NO: 293 - DNA, 1754 bp, Gossypium hirsutum
  misc_feature: Ceres CLONE ID no.1926437
  misc_feature: Encodes the peptide sequence at SEQ ID NO. 294
aaaagattcagactcctaacttctcacatttcttctcttttattctttaattcattcatttttttcctaaaaaaaaacaaaacaaaaccaaccccaaattcctcaatcaattactcaagatttaacaggtttcgttatggagatgcatccgagtagcaacgagaccgatttagcaatgttggactcaattcggcgacacttactcggggagtcatcagacttccgattcgatgcttccgttgattgtaccactaccacggctccccccgtgttttgcagaagctcaagcttcaaccgcttgtacccatgtttggctgaaacctggggtgaccttcctcttaaagaaaacgattctgaagatatgctcgtttttgagttcctccgagatgctttaaccgtaggctgggcgccctccgataactcttctatcaaatatacgccgattaaaccggagccgcaggagattttagttgaggctccagctgcgaatacggttgttcccgcggtggttccgaccaaagcgaggcattacagaggagttaggcaaaggccgtgggggaagttcgcagctgagataagggacccggctaaaaatggggctcgggtttggttaggtacttttgaaacagctgaggatgcggctttggcttatgataaagcagcttataggatgcgcgggtccaaggctttgttgaatttcccattgagggtgaattccggggagcctgacccagtgagggtaacgtcaaagagagcatcacccgagccgtccaatttttcatcatccggctcagagcaggggttaccgaaaaggaggagaaaggtggctccctcagctccggttgtgggtgaagcctggttagatatgagttcagcagctgcagttgagtatgaaattggatcacgtactaacagcaatcaactattaatcagctaatggattaatgaaagaagcagggaaaatgagggtctgaaatatttgtaaacttgtgttggctttgtgcatacaaagaaattgatattatttcatggttgtttcgctaaatgagaaaattttattctttaataaaaaatgatgtaagcaatatggttgaaaatggacattccaatgcagcaagatactgtaaaaacctagttttgatgtaggaagaagcatacaatcaaaatgtagatgtaggcgttggtatctcagccatttgaagatgacaaatccagaccagcttggcgttaggcctataataaaaggtagctgctcttctttctaacatgtgtttattttaccaatattctagaacatatggcgtcaagctgaaggaacaaggacgcacgtacacgaacgttgcgcggttagaaaaggacagttgacttttgggcaaagatggaatagctttatcctctatccaaacactaattgcttttttgaccttatacattcaaactgtttgacttttcagacttttcttccgacttctaaccaccaggattctttgttcacaatgagaaaaatgttttcacattgagtttggaaaggagatatgtttgagagtataggtgggtgggaatttgattggttgttgttttctattgattttctacaactacataattcatttggatttcataaaataactttttgacgtcaacagcttgcttatgggaaaggaatactcctacatgggatttaatttagatgaaatttgatcaaagctaaaataaacatttaaatgttgaagcaaaaaaaaaaaaaaaaaaaa

SEQ ID NO: 294 - protein, 266 aa, Gossypium hirsutum
  misc_feature: Ceres CLONE ID no. 1926437
  misc_feature: Score of 670.9 for HMM of FIGURE 7
  misc_feature (130)..(182): Pfam Name: AP2 Pfam Description: AP2 domain
  misc_feature: Functional Homolog of  Ceres CLONE ID no. 641355 at SEQ ID NO. 110
MEMHPSSNETDLAMLDSIRRHLLGESSDFRFDASVDCTTTTAPPVFCRSSSFNRLYPCLAETWGDLPLKENDSEDMLVFEFLRDALTVGWAPSDNSSIKYTPIKPEPQEILVEAPAANTVVPAVVPTKARHYRGVRQRPWGKFAAEIRDPAKNGARVWLGTFETAEDAALAYDKAAYRMRGSKALLNFPLRVNSGEPDPVRVTSKRASPEPSNFSSSGSEQGLPKRRRKVAPSAPVVGEAWLDMSSAAAVEYEIGSRTNSNQLLIS

SEQ ID NO: 295 - DNA, 417 bp, Populus balsamifera subsp. trichocarpa
  misc_feature: Ceres ANNOT ID no.1463335
  misc_feature: Encodes the peptide sequence at SEQ ID NO. 296
atggacgaggacaaaacaaagagcaaggatgaaggaggagaggtcaagtacagaggtgtcaggaagaggccatggggaaaattcgctgcggagatacgtgattcagccaggcaaggggcgagggtgtggctggggacttttagcacggcggaggaggcagcaagagcctatgacagagcagcttatgcaatgagagggcacttggccgttctcaattttcctaacgagtacccaaatatggccggtaatgctagcgttggttccagtagttctactcccttttcctcttcaggctatccaggttcttcttcctcttcatcatcaacgcaacaagaagtttttgagttcgaatgcttggatgataagttgcttgaggagctgctagagcaagaagagaaaaggagtaagaaaacgtaa

SEQ ID NO: 296 - protein, 138 aa, Populus balsamifera subsp. trichocarpa
  misc_feature: Ceres ANNOT ID no. 1463335
  misc_feature: Score of 277.3 for HMM of FIGURE 7
  misc_feature (15)..(67): Pfam Name: AP2 Pfam Description: AP2 domain
  misc_feature: Functional Homolog of  Ceres CLONE ID no. 641355 at SEQ ID NO. 110
MDEDKTKSKDEGGEVKYRGVRKRPWGKFAAEIRDSARQGARVWLGTFSTAEEAARAYDRAAYAMRGHLAVLNFPNEYPNMAGNASVGSSSSTPFSSSGYPGSSSSSSSTQQEVFEFECLDDKLLEELLEQEEKRSKKT

SEQ ID NO: 297 - DNA, 447 bp, Populus balsamifera subsp. trichocarpa
  misc_feature: Ceres ANNOT ID no.1463334
  misc_feature: Encodes the peptide sequence at SEQ ID NO. 298
atggaagagcctgataaagggaaggaaaaggaattgaaagggagagaagaggttcgataccggggtgttcgaaggagaccttggggaaaatttgcggcggaaatacgagacccatcaaggcagggagcaaggttatggttagggacatttgatacggcagaggaggcagctcgtgcttatgatagagctgcatttagcatgagaggtcatcttgcaatcctcaactttcctaatgattatctctctcaagcgataggatcttctcctcgtcgtccaccagtttcatcatctagtagtgatgttggtgcaagcgagagttttcagaggggaagctcatcaagtgccggacaaggaaagcaagttatcgagtttgagtacttggatgataagattttggaggagcttcttgaaacagaagaggagaagaagaaacggcagcaagattga

SEQ ID NO: 298 - protein, 148 aa, Populus balsamifera subsp. trichocarpa
  misc_feature: Ceres ANNOT ID no. 1463334
  misc_feature: Score of 193.1 for HMM of FIGURE 7
  misc_feature (18)..(70): Pfam Name: AP2 Pfam Description: AP2 domain
  misc_feature: Functional Homolog of  Ceres CLONE ID no. 641355 at SEQ ID NO. 110
MEEPDKGKEKELKGREEVRYRGVRRRPWGKFAAEIRDPSRQGARLWLGTFDTAEEAARAYDRAAFSMRGHLAILNFPNDYLSQAIGSSPRRPPVSSSSSDVGASESFQRGSSSSAGQGKQVIEFEYLDDKILEELLETEEEKKKRQQD

SEQ ID NO: 299 - DNA, 696 bp, Populus balsamifera subsp. trichocarpa
  misc_feature: Ceres ANNOT ID no.1442765
  misc_feature: Encodes the peptide sequence at SEQ ID NO. 300
atggaccatcctaatataggaaaggtcaaccagaaaggagaagaaatcagatacagaggcgttaggaggcggccatgggggaaatttgcagcggagatacgtgattcgacaaggcatggagcaaggttatggctagggacttttaacacagcagaagaggctgcaagggcttatgatggagctgcatatgcaatgaggggtcctttagcaatccttaacttccctggggaatatcctaaaactaaggttgattctgatataacttcatcttccatttcgtcttcaccattgtcatcatcctctgcttcatcttcctcaatgtcacagaacgcagaaagaagtgggattggacgaggaaaagaagtctttgagattgagtacttggatgataagttattggaggatcttcttgatttcgaggaagaaaataggaaaggactgcttttcccgcctctagaaattatgaagcttttattttgtgccccccgaccagacaaaaattggctgctcctatgtaatttcagtatctattacaaatcatggcacgccaagaacaggctaaatccatcatcaaccgtgaaaaagccaagtgtggtcctgtcgtttaaagaaccgagtccaccttcaaccttgtcgccaaacgtaatcacaggacgtcattaccagcagcagcagcaacaacaacaacaaagctaa

SEQ ID NO: 300 - protein, 231 aa, Populus balsamifera subsp. trichocarpa
  misc_feature: Ceres ANNOT ID no. 1442765
  misc_feature: Score of 182.1 for HMM of FIGURE 7
  misc_feature (16)..(68): Pfam Name: AP2 Pfam Description: AP2 domain
  misc_feature: Functional Homolog of  Ceres CLONE ID no. 641355 at SEQ ID NO. 110
MDHPNIGKVNQKGEEIRYRGVRRRPWGKFAAEIRDSTRHGARLWLGTFNTAEEAARAYDGAAYAMRGPLAILNFPGEYPKTKVDSDITSSSISSSPLSSSSASSSSMSQNAERSGIGRGKEVFEIEYLDDKLLEDLLDFEEENRKGLLFPPLEIMKLLFCAPRPDKNWLLLCNFSIYYKSWHAKNRLNPSSTVKKPSVVLSFKEPSPPSTLSPNVITGRHYQQQQQQQQQS

SEQ ID NO: 301 - DNA, 429 bp, Populus balsamifera subsp. trichocarpa
  misc_feature: Ceres ANNOT ID no.1442760
  misc_feature: Encodes the peptide sequence at SEQ ID NO. 302
atggaaacataccaaggggagaagaacacaaagaagcaagagaaaagaagagagaatgcgtataggggaattcgcaggcgaccatggggtaagtttgctgctgagatacgtgatccgacaaggaatggaacacgtcgttggcttggaacatttgacacagcagaggaggcggcccgggcctatgaccgagctgcctttgccttccggggtcatttagccatcctcaactttccgaacgaataccaacatcaggaaacaaactctaccatgtcatttgcttcttcatcttcattctccaccgagaatcctttgagttatggcaatgaagtttcctcgactaatggacaagaagttatagagtttgagtatctggataacaaattgttggaggagctgctggaaacagatgatcacagcaggcagctttag

SEQ ID NO: 302 - protein, 142 aa, Populus balsamifera subsp. trichocarpa
  misc_feature: Ceres ANNOT ID no. 1442760
  misc_feature: Score of 156.8 for HMM of FIGURE 7
  misc_feature (19)..(71): Pfam Name: AP2 Pfam Description: AP2 domain
  misc_feature: Functional Homolog of  Ceres CLONE ID no. 641355 at SEQ ID NO. 110
METYQGEKNTKKQEKRRENAYRGIRRRPWGKFAAEIRDPTRNGTRRWLGTFDTAEEAARAYDRAAFAFRGHLAILNFPNEYQHQETNSTMSFASSSSFSTENPLSYGNEVSSTNGQEVIEFEYLDNKLLEELLETDDHSRQL

SEQ ID NO: 303 - DNA, 843 bp, Populus balsamifera subsp. trichocarpa
  misc_feature: Ceres ANNOT ID no.1446840
  misc_feature: Encodes the peptide sequence at SEQ ID NO. 304
atgtacgggcagagcttacttgatcagcccgattatgcctttcttgatcccgttcgcttgcatttgcaaggcgaaactgtttctactgctcccaccactacttgcagctacactccagcaattacaacgacgacggctgctccagctgctaattatactccaccccttgtttattgcaggagcacaagcttcagcagcttgtatccttgcttaacagaaaactggggagacttgccactcaaggtcgacgattccgaggatatgttcctttatgctgtcctccgcgacgccgtcaccgttgggtgggtcccatcactcaaaaccgatcaactggtgcagcccaatttcccactagtgaaattggaacccacagagaatctggctgtctcgccgccctccacggcggttccagtggctgagcctgcggtgcttccgtccaaggggaagcattaccggggtgtgaggcagcggccttgggggaagttcgcagcggagattagggacccagcgaagaacggggcccgggtttggctggggacgttcgagacggcggaggatgcggcgttggcttacgaccgtgctgcctatagaatgcgtgggtcgagggcgttgttgaatttcccgttgagggtgaattccggtgagcctgatccggttagagtgacttcgaagaggtcttctccggagccatcatcgtcggtggacagcgggtcaccgaagaggaggaagaaggttggtggcacggcgggtgctgctacagtggtggctaaagctgggttggaaattgggaatggggttggatgtcaagtgggtacccatggcgagcaaatgttggttatctag

SEQ ID NO: 304 - protein, 193 aa, Populus balsamifera subsp. trichocarpa
  misc_feature: Ceres ANNOT ID no. 1446840
  misc_feature: Score of 236.1 for HMM of FIGURE 7
  misc_feature (62)..(114): Pfam Name: AP2 Pfam Description: AP2 domain
  misc_feature: Functional Homolog of  Ceres CLONE ID no. 641355 at SEQ ID NO. 110
MFLYAVLRDAVTVGWVPSLKTDQLVQPNFPLVKLEPTENLAVSPPSTAVPVAEPAVLPSKGKHYRGVRQRPWGKFAAEIRDPAKNGARVWLGTFETAEDAALAYDRAAYRMRGSRALLNFPLRVNSGEPDPVRVTSKRSSPEPSSSVDSGSPKRRKKVGGTAGAATVVAKAGLEIGNGVGCQVGTHGEQMLVI

SEQ ID NO: 305 - protein, 139 aa, Arabidopsis thaliana
  misc_feature: Public GI no. 42565130
  misc_feature: Score of 183.5 for HMM of FIGURE 7
  misc_feature (18)..(70): Pfam Name: AP2 Pfam Description: AP2 domain
  misc_feature: Functional Homolog of  Ceres CLONE ID no. 641355 at SEQ ID NO. 110
MESSNRSSNNQSQDDKQARFRGVRRRPWGKFAAEIRDPSRNGARLWLGTFETAEEAARAYDRAAFNLRGHLAILNFPNEYYPRMDDYSLRPPYASSSSSSSSGSTSTNVSRQNQREVFEFEYLDDKVLEELLDSEERKR

SEQ ID NO: 306 - protein, 131 aa, Arabidopsis thaliana
  misc_feature: Public GI no. 15239863
  misc_feature: Score of 258.4 for HMM of FIGURE 7
  misc_feature (13)..(65): Pfam Name: AP2 Pfam Description: AP2 domain
  misc_feature: Functional Homolog of  Ceres CLONE ID no. 641355 at SEQ ID NO. 110
MDQGGRGVGAEHGKYRGVRRRPWGKYAAEIRDSRKHGERVWLGTFDTAEEAARAYDQAAYSMRGQAAILNFPHEYNMGSGVSSSTAMAGSSSASASASSSSRQVFEFEYLDDSVLEELLEEGEKPNKGKKK

SEQ ID NO: 307 - protein, 132 aa, Arabidopsis thaliana
  misc_feature: Public GI no. 116831575
  misc_feature: Score of 258.4 for HMM of FIGURE 7
  misc_feature (13)..(65): Pfam Name: AP2 Pfam Description: AP2 domain
  misc_feature: Functional Homolog of  Ceres CLONE ID no. 641355 at SEQ ID NO. 110
MDQGGRGVGAEHGKYRGVRRRPWGKYAAEIRDSRKHGERVWLGTFDTAEEAARAYDQAAYSMRGQAAILNFPHEYNMGSGVSSSTAMAGSSSASASASSSSRQVFEFEYLDDSVLEELLEEGEKPNKGKKKG

SEQ ID NO: 308 - protein, 131 aa, Arabidopsis thaliana
  misc_feature: Public GI no. 48479320
  misc_feature: Score of 259.9 for HMM of FIGURE 7
  misc_feature (13)..(65): Pfam Name: AP2 Pfam Description: AP2 domain
  misc_feature: Functional Homolog of  Ceres CLONE ID no. 641355 at SEQ ID NO. 110
MDQGGRGVGAEHGKYRGVRRRPWGKYAAEIRDSRKHGERVWLGTFDTAEEAARAYDQAAYSMRGQAAILNFPHEYNMGSGGSSSTAMAGSSSSSASASSSSRQVFEFEYLDDSVLEELLEEGEKPNKGKKK

SEQ ID NO: 309 - protein, 139 aa, Arabidopsis thaliana
  misc_feature: Public GI no. 145338854
  misc_feature: Score of 187.1 for HMM of FIGURE 7
  misc_feature (12)..(64): Pfam Name: AP2 Pfam Description: AP2 domain
  misc_feature: Functional Homolog of  Ceres CLONE ID no. 641355 at SEQ ID NO. 110
MERIESYNTNEMKYRGVRKRPWGKYAAEIRDSARHGARVWLGTFNTAEDAARAYDRAAFGMRGQRAILNFPHEYQMMKDGPNGSHENAVASSSSGYRGGGGGDDGREVIEFEYLDDSLLEELLDYGERSNQDNCNDANR

SEQ ID NO: 310 - protein, 128 aa, Arabidopsis thaliana
  misc_feature: Public GI no. 48479286
  misc_feature: Score of 164.9 for HMM of FIGURE 7
  misc_feature (1)..(53): Pfam Name: AP2 Pfam Description: AP2 domain
  misc_feature: Functional Homolog of  Ceres CLONE ID no. 641355 at SEQ ID NO. 110
MKYRGVRKRPWGKYAAEIRDSARHGARVWLGTFNTAEDAARAYDRAAFGMRGQRAILNFPHEYQMMKDGPNGSHENAVASSSSGYRGGGGGDDGREVIEFEYLDDSLLEELLDYGERSNQDNCNDANR

SEQ ID NO: 311 - protein, 268 aa, Arabidopsis thaliana
  misc_feature: Public GI no. 21264420
  misc_feature: Score of 310.5 for HMM of FIGURE 7
  misc_feature (146)..(198): Pfam Name: AP2 Pfam Description: AP2 domain
  misc_feature: Functional Homolog of  Ceres CLONE ID no. 641355 at SEQ ID NO. 110
MSMTADSQSDYAFLESIRRHLLGESEPILSESTASSVTQSCVTGQSIKPVYGRNPSFSKLYPCFTESWGDLPLKENDSEDMLVYGILNDAFHGGWEPSSSSSDEDRSSFPSVKIETPESFAAVDSVPVKKEKTSPVSAAVTAAKGKHYRGVRQRPWGKFAAEIRDPAKNGARVWLGTFETAEDAALAYDRAAFRMRGSRALLNFPLRVNSGEPDPVRIKSKRSSFSSSNENGAPKKRRTVAAGGGMDKGLTVKCEVVEVARGDRLLVL

SEQ ID NO: 312 - protein, 225 aa, Arabidopsis thaliana
  misc_feature: Public GI no. 25350257
  misc_feature: Score of 267.8 for HMM of FIGURE 7
  misc_feature (103)..(155): Pfam Name: AP2 Pfam Description: AP2 domain
  misc_feature: Functional Homolog of  Ceres CLONE ID no. 641355 at SEQ ID NO. 110
GQSIKPVYGRNPSFSKLYPCFTESWGDLPLKENDSEDMLVYGILNDAFHGGWEPSSSSSDEDRSSFPSVKIETPESFAAVDSVPVKKEKTSPVSAAVTAAKGKHYRGVRQRPWGKFAAEIRDPAKNGARVWLGTFETAEDAALAYDRAAFRMRGSRALLNFPLRVNSGEPDPVRIKSKRSSFSSSNENGAPKKRRTVAAGGGMDKGLTVKCEVVEVARGDRLLVL

SEQ ID NO: 313 - protein, 266 aa, Arabidopsis thaliana
  misc_feature: Public GI no. 25350258
  misc_feature: Score of 307.7 for HMM of FIGURE 7
  misc_feature (144)..(196): Pfam Name: AP2 Pfam Description: AP2 domain
  misc_feature: Functional Homolog of  Ceres CLONE ID no. 641355 at SEQ ID NO. 110
MTADSQSDYAFLESIRRHLLGESEPILSESTASSVTQSCVTGQSIKPVYGRNPSFSKLYPCFTESWGDLPLKENDSEDMLVYGILNDAFHGGWEPSSSSSDEDRSSFPSVKIETPESFAAVDSVPVKKEKTSPVSAAVTAAKGKHYRGVRQRPWGKFAAEIRDPAKNGARVWLGTFETAEDAALAYDRAAFRMRGSRALLNFPLRVNSGEPDPVRIKSKRSSFSSSNENGAPKKRRTVAAGGGMDKGLTVKCEVVEVARGDRLLVL

SEQ ID NO: 314 - DNA, 961 bp, Arabidopsis thaliana
  misc_feature: Ceres CLONE ID no.6042
  misc_feature: Encodes the peptide sequence at SEQ ID NO. 315
attcacaccggacattttgaaatctcaacaagaaccaaaccaaacaacaaaaaaacattcttaataattctctttctgttatgtcgatgacggcggattctcaatctgattatgcttttcttgagtccatacgacgacacttactaggagaatcggagccgatactcagtgagtcgacagcgagttcggttactcaatcttgtgtaaccggtcagagcattaaaccggtgtacggacgaaaccctagctttagcaaactgtatccttgcttcaccgagagctggggagatttgccgttgaaagaaaacgattctgaggatatgttagtttacggtatcctcaacgacgcctttcacggcggttgggagccgtcttcttcgtcttccgacgaagatcgtagctctttcccgagtgttaagatcgagactccggagagtttcgcggcggtggattctgttccggtcaagaaggagaagacgagtcctgtttcggcggcggtgacggcggcgaagggaaagcattatagaggagtgagacaaaggccgtgggggaaatttgcggcggagattagagacccggcgaagaacggagctagggtttggttaggaacgtttgagacggcggaggacgcggcgttggcttacgacagagctgctttcaggatgcgtggttcccgcgctttgttgaattttccgttgagagttaattcaggagaacccgacccggttcgaatcaagtccaagagatcttctttttcttcttctaacgagaacggagctccgaagaagaggagaacggtggccgccggtggtggaatggataaggggttgacggtgaagtgcgaggttgttgaagtggcacgtggcgactgtttattggttttataattttgatttttctttgttggatgattatatgattcttcaaaaaagaagaacgttaataaaaaaattcgtttatt

SEQ ID NO: 315 - protein, 268 aa, Arabidopsis thaliana
  misc_feature: Ceres CLONE ID no. 6042
  misc_feature: Score of 307.5 for HMM of FIGURE 7
  misc_feature (146)..(198): Pfam Name: AP2 Pfam Description: AP2 domain
  misc_feature: Functional Homolog of  Ceres CLONE ID no. 641355 at SEQ ID NO. 110
MSMTADSQSDYAFLESIRRHLLGESEPILSESTASSVTQSCVTGQSIKPVYGRNPSFSKLYPCFTESWGDLPLKENDSEDMLVYGILNDAFHGGWEPSSSSSDEDRSSFPSVKIETPESFAAVDSVPVKKEKTSPVSAAVTAAKGKHYRGVRQRPWGKFAAEIRDPAKNGARVWLGTFETAEDAALAYDRAAFRMRGSRALLNFPLRVNSGEPDPVRIKSKRSSFSSSNENGAPKKRRTVAAGGGMDKGLTVKCEVVEVARGDCLLVL

SEQ ID NO: 316 - protein, 188 aa, Arabidopsis thaliana
  misc_feature: Public GI no. 18414897
  misc_feature: Score of 180.4 for HMM of FIGURE 7
  misc_feature (66)..(118): Pfam Name: AP2 Pfam Description: AP2 domain
  misc_feature: Functional Homolog of  Ceres CLONE ID no. 641355 at SEQ ID NO. 110
MLVYGILNDAFHGGWEPSSSSSDEDRSSFPSVKIETPESFAAVDSVPVKKEKTSPVSAAVTAAKGKHYRGVRQRPWGKFAAEIRDPAKNGARVWLGTFETAEDAALAYDRAAFRMRGSRALLNFPLRVNSGEPDPVRIKSKRSSFSSSNENGAPKKRRTVAAGGGMDKGLTVKCEVVEVARGDRLLVL

SEQ ID NO: 317 - DNA, 865 bp, Brassica napus
  misc_feature: Ceres CLONE ID no.965028
  misc_feature: Encodes the peptide sequence at SEQ ID NO. 318
gcacaacacaatcaaaaccataaaccaacgactccaagtctcatatatggcttcttcacaagaccaatcagctttggacctcatcactcaacacctccttaccgatttcccttcattggagactttcgtctctagcatccatcagagcaccacctccactcttagccaacgcaagccatctcttgccaccatttcagttcctactactgcaccggtggttcaagaggatgatcataggcattacaggggcgtgaggcgtaggccgtggggtaagtatgcggctgagatcagagacccaaacaagaaaggcgttcgtgtctggttaggtacttttgacacggccgtggaggctgcaagaggttacgacagggctgcttttaaactaagaggaagcaaagccattcttaacttcccactagaagcaggcaagcacgaggacaacaacactgtggctttgaaatctaagaggaagagaccagaaacacaggatgaaaaccatggcagaaacctgatcagccataaagctgtgataagggaaragacggaagctcagggtgaggcttgtccgttaacaccatcaagttggatggggttttgggatggagtagacggtatagggacgggactattctctgtgcctcctttatctccttacccatcgctaggacattctcaactcggagttaagtaagcttatggatgtaggtgacatccgcaactttggattttatatcatcggcaagcgaacacacaaagaatcttaaagattgtattaaagattcctcatggagtgaattcgtttcttgatttgttgattgtaaatggtttgttatattcattcgttcttctcagtgcaattatctct

SEQ ID NO: 318 - protein, 214 aa, Brassica napus
  misc_feature: Ceres CLONE ID no. 965028
  misc_feature: Score of 459.7 for HMM of FIGURE 7
  misc_feature (64)..(116): Pfam Name: AP2 Pfam Description: AP2 domain
  misc_feature: Functional Homolog of  Ceres CLONE ID no. 641355 at SEQ ID NO. 110
  misc_feature (165)..(165): Xaa is any aa, unknown, or other
MASSQDQSALDLITQHLLTDFPSLETFVSSIHQSTTSTLSQRKPSLATISVPTTAPVVQEDDHRHYRGVRRRPWGKYAAEIRDPNKKGVRVWLGTFDTAVEAARGYDRAAFKLRGSKAILNFPLEAGKHEDNNTVALKSKRKRPETQDENHGRNLISHKAVIREXTEAQGEACPLTPSSWMGFWDGVDGIGTGLFSVPPLSPYPSLGHSQLGVK

SEQ ID NO: 319 - DNA, 893 bp, Brassica napus
  misc_feature: Ceres CLONE ID no.1080500
  misc_feature: Encodes the peptide sequence at SEQ ID NO. 320
aacacaatcaaaaccataaaccaacgactccaagtctctcatatatggcatcttcacaagaccaatcagctttggacctcatcactcaacacctccttaccgatttcccttccttagagactttcgtctctagcatccatcagagcaccacctccactcttagccaacgcaagccatctcttgccaccatttcagttcctactactgcaccggtggttcaagaggatgatcataggcattacaggggcgtgaggcgtaggccgtggggtaagtatgcggctgagatcagagacccaaacaagaaaggcgttcgtgtctggttaggtacttttgacacggccgtggaggctgcaagaggttacgacagggctgcttttaaactaagaggaagcaaagccattcttaacttcccactagaagcaggcaagcaccaggactctggagacaacaagaacaagaagactgtggctttgaaagctaagaggaagagaccagaaacagaggatgaaaaccatgagagaaacctgatcagtcataaagctgtgaaaagggaagagacggaagctcagggtgaggcttgtccgttaacaccatcaagttggatggggttttgggacgcagtagacggtatagggatgggactattctctgtgcctcctttatctccttacccatcgctaggacattctcaactcggagttaagtaagcttatggatgtaggtgacatccgcaactttggattatatatcatcggcaagcgaacacacaaacaagacaataattatcttaaggattgtattaaagattcctcacggagtgaattagtttgtagattggttgattgtaaatggtttgttatattcattcgttcttctcaaaaaaaaaaaaaaaa

SEQ ID NO: 320 - protein, 220 aa, Brassica napus
  misc_feature: Ceres CLONE ID no. 1080500
  misc_feature: Score of 500.3 for HMM of FIGURE 7
  misc_feature (64)..(116): Pfam Name: AP2 Pfam Description: AP2 domain
  misc_feature: Functional Homolog of  Ceres CLONE ID no. 641355 at SEQ ID NO. 110
MASSQDQSALDLITQHLLTDFPSLETFVSSIHQSTTSTLSQRKPSLATISVPTTAPVVQEDDHRHYRGVRRRPWGKYAAEIRDPNKKGVRVWLGTFDTAVEAARGYDRAAFKLRGSKAILNFPLEAGKHQDSGDNKNKKTVALKAKRKRPETEDENHERNLISHKAVKREETEAQGEACPLTPSSWMGFWDAVDGIGMGLFSVPPLSPYPSLGHSQLGVK

SEQ ID NO: 321 - DNA, 576 bp, Glycine max
  misc_feature: Ceres CLONE ID no.641355
  misc_feature: Encodes the peptide sequence at SEQ ID NO. 322
aattaattaaggcacacaatggaagaggagtcaaaggagaaaaagaaggacactaaggaggaaccacgttatagaggagtgcggcggcggccgtgggggaagttcgcggccgagattcgggacccggcccggcacggtgcccgagtgtggctggggacatttctcacggcggaggaggctgctagggcttatgaccgagctgcctatgagatgaggggcgctttagccgttytcaattttccaaatgagtatccttcatgctcttctatgaactcatcttcaacattagcaccttcatcttyttcttcaaattcaatgcttaaaagtgatcatggtaaacaagttattgagttcgagtgcttggatgacaaattgttagaggaccttcttgattgtgatgactatgcctacgagaaagacttgcctaagaactgaacggtttgatcaaatttgaatgttagattgatttcaaagcatacctatagtagggtgaatgtcttcatatatgatatgatttccttttaggcagcactttactttggtgagtatggtttataacttaagaatgactttgtt

SEQ ID NO: 322 - protein, 138 aa, Glycine max
  misc_feature: Ceres CLONE ID no. 641355
  misc_feature: Score of 285.0 for HMM of FIGURE 7
  misc_feature (16)..(68): Pfam Name: AP2 Pfam Description: AP2 domain
  misc_feature: Functional Homolog of  Ceres CLONE ID no. 641355 at SEQ ID NO. 110
  misc_feature (72)..(72): Xaa is any aa, unknown, or other
  misc_feature (95)..(95): Xaa is any aa, unknown, or other
MEEESKEKKKDTKEEPRYRGVRRRPWGKFAAEIRDPARHGARVWLGTFLTAEEAARAYDRAAYEMRGALAVXNFPNEYPSCSSMNSSSTLAPSSXSSNSMLKSDHGKQVIEFECLDDKLLEDLLDCDDYAYEKDLPKN

SEQ ID NO: 323 - DNA, 1444 bp, Triticum aestivum
  misc_feature: Ceres CLONE ID no.907605
  misc_feature: Encodes the peptide sequence at SEQ ID NO. 324
acgcagctggacttgcattcgcacacacgcctccaaatccaacacgagctcagctcagctctctgtctgtctccctctccctctctcggccgccgacctcagctctgctccgatcgatcaaaccatggacttcggcggcgacatggacgacttctcgctccagtacatccacgagcagctgcggctccagctgctcggcgccgacccctgcggcctcctgcccctccccgcggcggacgacttcgccgcgcagccggacttcatccctgccgagttcctgccgcagccgctgcccgccttcgtcgacctgacggcgaccgactacgccgacgcggcggcgtatcgcgccgccgcggagccggtcattatacggttcggcggcgaggcgtcccccgtgtcggaccccgcccggaggccgtcgctgaccatctcgctgcccccggcctcgcacgcctgggcgcaggcgccggtgctggcggcagaggccgcggcggccgtggacgccaacgacttccggaagtaccgcggcgtgcgccagcggccgtggggcaagttcgcggcggagatccgggaccccaacaagcgcggctcgcgcgtgtggctcggcacctacgacacctccatcgaggccgcgcgagcgtacgaccgcgccgccttccgcatgcgcggcgccaaggccatcctcaacttccccaacgaggtcggctcccgcggcgccaccgacttcgtcgccccgccgccgtcgcaaaccgcgcgcgcggcgccgacgtcgcacaacaagcggaagcggcaagaggcggccgagccatgcgtcgaggtggtccgggatgccacgaaacacagcaaggccgacgcgtccgcgtcgccagcgtcgtcgctcacctcaacgccgacctcgacggtgacgtccggcaccaccaccccatcctcgtcggatgccggcggctactacgagatgtcgttcccgctggcgtcaccgactagctggacgtgggatcagctgctggccgaagggatgttcggcagcctgtcgccgcgccagcagctgggtagcttcccggaggtcaccgtgaactgagactggcggaactaccgggccgccggtacggtcgacgccaggaactgtagagcctgtgaaaagagtaagctaagcatggtgattacttaggtgtaaattaagctgccaataattagtggctcctagttctcgacggcctacgctttggactcatcttgggagcttggcctggagctgtgcactgtgtacaggattacaggagtgaggacgatagaatattaccagcgcatgcatgtcacgggtgatcaacgtaagcatcgacgacataggtagatgttgatatatacttacactgcatagatatgtatgtaatgtaaattacgtgaagatcaaagtgtgggtgcttgtctaaaaaaaaaaaaaaaa

SEQ ID NO: 324 - protein, 317 aa, Triticum aestivum
  misc_feature: Ceres CLONE ID no. 907605
  misc_feature: Score of 116.9 for HMM of FIGURE 7
  misc_feature (131)..(183): Pfam Name: AP2 Pfam Description: AP2 domain
  misc_feature: Functional Homolog of  Ceres CLONE ID no. 641355 at SEQ ID NO. 110
MDFGGDMDDFSLQYIHEQLRLQLLGADPCGLLPLPAADDFAAQPDFIPAEFLPQPLPAFVDLTATDYADAAAYRAAAEPVIIRFGGEASPVSDPARRPSLTISLPPASHAWAQAPVLAAEAAAAVDANDFRKYRGVRQRPWGKFAAEIRDPNKRGSRVWLGTYDTSIEAARAYDRAAFRMRGAKAILNFPNEVGSRGATDFVAPPPSQTARAAPTSHNKRKRQEAAEPCVEVVRDATKHSKADASASPASSLTSTPTSTVTSGTTTPSSSDAGGYYEMSFPLASPTSWTWDQLLAEGMFGSLSPRQQLGSFPEVTVN

SEQ ID NO: 325 - DNA, 1469 bp, Triticum aestivum
  misc_feature: Ceres CLONE ID no.555364
  misc_feature: Encodes the peptide sequence at SEQ ID NO. 326
attcgactcgacgccctcggttcacacacactgatcagctcagctacagcctacagagtacagacccaacccaactccgggagacaacagagcagagcacggcgagaatgctgctgaacccggcctcggaggcgctggtgctcgacagcatcaggcagcacctcatggaggacacggcggcgccggcgccggaggcgaggaggcagcggccggcctactgccgcagcgccagcttcgggagcctggtggccgaccagtggagcgagtcgctcccgttccgcgccgacgactccgacgacatggtcgtctacggcgcgctccgcgacgccttctcctgcggctggctccccgacggctccttcgccgccgtcaagccggagcccctcctgccttccccggactcctgctacgtcggcttcctcgagccggagacgcctccggccacgtccccgggagagagcgaggaggaggccgccgcggcgttcatgggcgaggcggccgcggccgcggcgagggggaagcactaccgcggggtgaggcagcggccgtggggcaagttcgcggcggagatccgggacccggccaagaacggcgcgcgcgtgtggctcggcacctacgacaccgccgaggacgccgccgtggcctacgaccgcgccgcgtaccgcatgcgcggctcccgcgccctcctcaacttcccgctccgcatcggctccgagatcgccgccgcgcacgccgcggccgcggccgccggggacaagcggccttcccccgagccggcgacctcagactcgtcgtcgtcctcctcctcctccgggtccccgaaaagaaggaagaggggcgaggccgcggccgcgtccatggccatggcgctggtgccgccgccctcgcagctgagccggccggcccaggcgtggtaccccgcggcgccggtggagcaggtggccatggcgccgcgcgcgcagcagctggtcagctaggccccgctcgccagcccccgggcgcacgatcggtcgtaaaagcacacaatgcgcaagtgcaatggattcgccagcaagtgcatggacgcgacagcaacaggagcccgcctttcactggtgcacggtgcaaggtggtgatggcaatggagagcgatggcgagcgagcgagcgagcaatcaggcaaagcaaccttggcgacggctccatttggatatttggatgggtcgagccgtcgacaacggaagataagctcggagcaactgggtgctgcaatttggcctggaatgatagttcctcctctctccactgctcggtgcaactcgcccaagtggatcaaagcgaaactgtgccagtatcggatcgtcgtggttccttctgagtcgtagggttatattttgtcactgtcagagtgcgtgtggtaaaaattacaaactcgtgaatcgtgatcgagcataatggaacttgtgaaactttacaaaaaaaaaaaaaaaa

SEQ ID NO: 326 - protein, 289 aa, Triticum aestivum
  misc_feature: Ceres CLONE ID no. 555364
  misc_feature: Score of 674.4 for HMM of FIGURE 7
  misc_feature (138)..(190): Pfam Name: AP2 Pfam Description: AP2 domain
  misc_feature: Functional Homolog of  Ceres CLONE ID no. 641355 at SEQ ID NO. 110
MLLNPASEALVLDSIRQHLMEDTAAPAPEARRQRPAYCRSASFGSLVADQWSESLPFRADDSDDMVVYGALRDAFSCGWLPDGSFAAVKPEPLLPSPDSCYVGFLEPETPPATSPGESEEEAAAAFMGEAAAAAARGKHYRGVRQRPWGKFAAEIRDPAKNGARVWLGTYDTAEDAAVAYDRAAYRMRGSRALLNFPLRIGSEIAAAHAAAAAAGDKRPSPEPATSDSSSSSSSSGSPKRRKRGEAAAASMAMALVPPPSQLSRPAQAWYPAAPVEQVAMAPRAQQLVS

SEQ ID NO: 327 - DNA, 1323 bp, Triticum aestivum
  misc_feature: Ceres CLONE ID no.569593
  misc_feature: Encodes the peptide sequence at SEQ ID NO. 328
attcgactccacaccctcggttcacacacagtgatcagctcagctacagcctacagagcacagacccaaccccgggagacaacagagcacggcgaggatgctgctgaacccggcctcggaggcgatggtgctggacagcatcaggcagcacctcatggaggacacggcggctccggcgccggaggcgaggaggcagaggccggcctactgccgcagcgccagcttcgggagcctggtggccgaccagtggagcgagtcgctcccgttccgcgcggacgactccgacgacatggtcgtctacggcgcgctccgcgacgccttctcctgcggctggctccccgacggctccttcgccgccgtcaagccggagcccctcctgccttccccggactcctgctatgtcggcttcctcgagccggagacgcctccggccacgtccccgggcgggagcgaggaggaggccgccgcggcgttcatgggcgaggaggcggccgcggccgtggcgagggggaagcactaccgcggggtgaggcagcggccgtggggcaagttcgcggcggagatccgggacccggccaagaacggcgcccgcgtgtggctcggcacctacgacaccgccgaggacgccgccgtggcctacgaccgcgccgcgtaccgcatgcgcggctcccgcgcgctcctcaacttcccgctccgcatcggctccgagatcgccgccgcgcacgccgcggccgcggccgccggcgacaagcggccgtcgcccgagcccgcgacatcggactcgtcatcctcctcgtcctcctccgggtccccgaaaaggaggaagagaggcgaggccgcggccgcgtccatggccatggcgctggtgccgccgtcctcgcagttgagccggccggcccacgcgtggtaccccgccgtgccggcggagcaggtggccatggcgccgtgcgtgcagcagctggtcagctaggccccgctctccagcccccgggcgcacgatcgtgaaagacaatgcgcaagtgcagtggattcgccagcaagtgcatggacgcgacagcaacaggagcccgcctttcactgttgcacggtgcaaggtggtgatggcaatggagtgcgatacctatcgagcgagcaggcaaagcaaccttggcgacggctccatttggatagatatttggatatttgatggcaatggaagataagctctcggagcaactgggcgctgcaatttggtctggaacgatagttcctcctctggctgctcggtgcaactcgcccaagtgggtcaaagcgaaactgtgctagtatcgggttgtcgtggtt

SEQ ID NO: 328 - protein, 290 aa, Triticum aestivum
  misc_feature: Ceres CLONE ID no. 569593
  misc_feature: Score of 641.0 for HMM of FIGURE 7
  misc_feature (139)..(191): Pfam Name: AP2 Pfam Description: AP2 domain
  misc_feature: Functional Homolog of  Ceres CLONE ID no. 641355 at SEQ ID NO. 110
MLLNPASEAMVLDSIRQHLMEDTAAPAPEARRQRPAYCRSASFGSLVADQWSESLPFRADDSDDMVVYGALRDAFSCGWLPDGSFAAVKPEPLLPSPDSCYVGFLEPETPPATSPGGSEEEAAAAFMGEEAAAAVARGKHYRGVRQRPWGKFAAEIRDPAKNGARVWLGTYDTAEDAAVAYDRAAYRMRGSRALLNFPLRIGSEIAAAHAAAAAAGDKRPSPEPATSDSSSSSSSSGSPKRRKRGEAAAASMAMALVPPSSQLSRPAHAWYPAVPAEQVAMAPCVQQLVS

SEQ ID NO: 329 - protein, 130 aa, Oryza sativa subsp. indica
  misc_feature: Public GI no. 125547473
  misc_feature: Score of 144.1 for HMM of FIGURE 7
  misc_feature (10)..(62): Pfam Name: AP2 Pfam Description: AP2 domain
  misc_feature: Functional Homolog of  Ceres CLONE ID no. 641355 at SEQ ID NO. 110
MEDDKKEAASKYRGVRRRPWGKFAAEIRDPERGGSRVWLGTFDTAEEAARAYDRAAFAMKGAMAVLNFPGRTSSTGSSSSSSSSSTPPAPVTTSRHCADTTEKVELVYLDDKVLDELLAEDYSYRNNNNY

SEQ ID NO: 330 - protein, 136 aa, Oryza sativa subsp. indica
  misc_feature: Public GI no. 125562586
  misc_feature: Score of 155.3 for HMM of FIGURE 7
  misc_feature (20)..(72): Pfam Name: AP2 Pfam Description: AP2 domain
  misc_feature: Functional Homolog of  Ceres CLONE ID no. 641355 at SEQ ID NO. 110
MDGDGGGGWDDQGNGGGETTKYRGVRRRPSGKFAAEIRDSSRQSVRVWLGTFDTAEEAARAYDRAAYAMRGHLAVLNFPAEARNYVRGSGSSSSSRQHQQRQVIELECLDDQVLQEMLKGGDDQYRSASGSKRNNY

SEQ ID NO: 331 - protein, 124 aa, Oryza sativa subsp. japonica
  misc_feature: Public GI no. 31432356
  misc_feature: Score of 217.7 for HMM of FIGURE 7
  misc_feature (11)..(63): Pfam Name: AP2 Pfam Description: AP2 domain
  misc_feature: Functional Homolog of  Ceres CLONE ID no. 641355 at SEQ ID NO. 110
MEDNRSKDTATKYRGVRRRPWGKFAAEIRDPERGGARVWLGTFDTAEEAARAYDRAAYAQRGAAAVLNFPAAAAAGRGGGAGGAASGSSSSSSAQRGRGDKIEFEYLDDKVLDDLLDDEKYRGK

SEQ ID NO: 332 - protein, 144 aa, Oryza sativa subsp. japonica
  misc_feature: Public GI no. 125574952
  misc_feature: Score of 217.7 for HMM of FIGURE 7
  misc_feature (11)..(63): Pfam Name: AP2 Pfam Description: AP2 domain
  misc_feature: Functional Homolog of  Ceres CLONE ID no. 641355 at SEQ ID NO. 110
MEDNRSKDTATKYRGVRRRPWGKFAAEIRDPERGGARVWLGTFDTAEEAARAYDRAAYAQRGAAAVLNFPAAAAAGRGGGAGGAASGSSSSSSAQRGRGDKIEFEYLDDKVLDDLLDDEKYRGKMIKIMIRARHLVLACMHKNK

SEQ ID NO: 333 - protein, 141 aa, Oryza sativa subsp. japonica
  misc_feature: Public GI no. 115450749
  misc_feature: Score of 150.6 for HMM of FIGURE 7
  misc_feature (13)..(65): Pfam Name: AP2 Pfam Description: AP2 domain
  misc_feature: Functional Homolog of  Ceres CLONE ID no. 641355 at SEQ ID NO. 110
MEDDKSKEGKSSSSYRGVRKRPWGKFAAEIRDPERGGARVWLGTFDTAEEAARAYDRAAFAMKGATAMLNFPGDHHHGAASRMTSTGSSSSSFTTPPPANSSAAAGRGGSDRTTDKVELECLDDKVLEDLLAETNYRDKNY

SEQ ID NO: 334 - protein, 141 aa, Oryza sativa subsp. japonica
  misc_feature: Public GI no. 125584936
  misc_feature: Score of 145.3 for HMM of FIGURE 7
  misc_feature (13)..(65): Pfam Name: AP2 Pfam Description: AP2 domain
  misc_feature: Functional Homolog of  Ceres CLONE ID no. 641355 at SEQ ID NO. 110
MEDDKSKEGKSSSSYRGVRKRPWGKFAAEIRDPERGGARVWLGTFDTAEKAARAYDRAAFAMKGATAMLNFPGDHHHGAASRMTSTGSSSSSFTTPPPANSSAAAGRGGSDRTTDKVELECLDDKVLEDLLAETNYRDKNY

SEQ ID NO: 335 - protein, 128 aa, Oryza sativa subsp. japonica
  misc_feature: Public GI no. 115457454
  misc_feature: Score of 146.5 for HMM of FIGURE 7
  misc_feature (10)..(62): Pfam Name: AP2 Pfam Description: AP2 domain
  misc_feature: Functional Homolog of  Ceres CLONE ID no. 641355 at SEQ ID NO. 110
MEDDKKEAASKYRGVRRRPWGKFAAEIRDPERGGSRVWLGTFDTAEEAARAYDRAAFAMKGAMAVLNFPGRTSSTGSSSSSSSTPPAPVTTSRHCADTTEKVELVYLDDKVLDELLAEDYSYRNNNNY

SEQ ID NO: 336 - protein, 131 aa, Oryza sativa subsp. japonica
  misc_feature: Public GI no. 52076099
  misc_feature: Score of 152.6 for HMM of FIGURE 7
  misc_feature (16)..(68): Pfam Name: AP2 Pfam Description: AP2 domain
  misc_feature: Functional Homolog of  Ceres CLONE ID no. 641355 at SEQ ID NO. 110
MDHHHQQQQQEGELVAKYRGVRRRPWGKFAAEIRDSSRHGVRVWLGTFDTAEEAARAYDRSAYSMRGANAVLNFPADAHIYARQLHNNNAAAGSSSSSSAAAAAARPPPIEFEYLDDHVLQEMLRDHTTNK

SEQ ID NO: 337 - protein, 136 aa, Oryza sativa subsp. japonica
  misc_feature: Public GI no. 28071302
  misc_feature: Score of 153.3 for HMM of FIGURE 7
  misc_feature (20)..(72): Pfam Name: AP2 Pfam Description: AP2 domain
  misc_feature: Functional Homolog of  Ceres CLONE ID no. 641355 at SEQ ID NO. 110
MDGDGGGGWDDQGNGGGETTKYRGVRRRPSGKFAAEIRDSSRQSVRVWLGTFDTAEEAARAYDRAAYAMRGHLAVLNFPAEARNYVRGSGSSSSSRQHQQRQVIELECLDDQVLQEMLKGGDDQYRSAAGSKRNNY

SEQ ID NO: 338 - protein, 213 aa, Oryza sativa subsp. japonica
  misc_feature: Public GI no. 115439973
  misc_feature: Score of 91.6 for HMM of FIGURE 7
  misc_feature (125)..(177): Pfam Name: AP2 Pfam Description: AP2 domain
  misc_feature: Functional Homolog of  Ceres CLONE ID no. 641355 at SEQ ID NO. 110
MSLSLGFSAGAGVGADRLAAAPALQAAGALPPRVDVSLSLARAANGQPSSYLPLNENDSLDMVLFDVLREASAVAALSSSSSSSPELGARTTAPVVAGHPAGRKGGGGGGGGRGAAARGGAAGGRHYRGVRRRPWGKYAAEIRDPTRHGARLWLGTFGTAEEAAAAYDRAAFRMRGAKALLNFPPAVAGDGARRGAAAAAKQVGMSDESETKN

SEQ ID NO: 339 - protein, 212 aa, Oryza sativa subsp. japonica
  misc_feature: Public GI no. 57899163
  misc_feature: Score of 86.9 for HMM of FIGURE 7
  misc_feature (125)..(177): Pfam Name: AP2 Pfam Description: AP2 domain
  misc_feature: Functional Homolog of  Ceres CLONE ID no. 641355 at SEQ ID NO. 110
MSLSLGFSAGAGVGADRLAAAPALQAAGALPPRVDVSLSLARAANGQPSSYLPLNENDSLDMVLFDVLREASAVAALSSSSSSSPELGARTTAPVVAGHPAGRKGGGGGGGGRGAAARGGAAGGRHYRGVRRRPWGKYAAEIRDPTRHGARLWLGTFGTAEEAAAAYDRAAFRMRGAKALLNFPPAVAGDGARRGAAAAAKQVGMSDGECVI

SEQ ID NO: 340 - DNA, 1123 bp, Gossypium hirsutum
  misc_feature: Ceres CLONE ID no.1832286
  misc_feature: Encodes the peptide sequence at SEQ ID NO. 341
ttggatttggatggatcttcacaatcttcgcctttacatctcctttttaaacactctttctctttcttctttatttaaaaatccaaatccaaacccttgtttccttgtttctaaaaccacacatttacacacacacacagagagcctcctcttcttctttttaactcatcactctcatactggattatggaggttgctggtgaggttttagcatctgagtctcaattgcatgttcttgccgtggatgatagtcacgtcgatcgtaaggttattgaaaagttgctaaagatatcctcttgtaaagtcacaactgtggagagtggggcaagagccttgcagtttcttggtttggatgaagaaaaagggtctctgggtttcaatggtttgaaggtgaatcttataattacggattactccatgcccggaatgactggatatgaactcctcaagaaaatcaagcgatcatcaacctttagagaaattcctgtggtgatcatgtcctccgagaacatcctcacccgtattgatagctgtttggaggaaggggcggaggagtttctagttaagcccgtgaaactggcggatgtgaaacgggtgatgaatgattgcataatgagaggagaaacagagggaaacaaaaggagaagagttgacaaaagaaagtttgaagacgataaccatgcttcatcatcgtcgtcatcatcatcatcatcaataccatcatctccgtcatcaccattaccatcctcaccatcgactgcagcaacctcatcacctctgcattcattgaagagggcaaaattgcgcgaccataactagttcccctcatccgttttttcgatggtaaatttttttttgtcaatatcctcgcaatttccctcatatggataacttgtgtaaatggcacttatcaaggcctctttagaagctgataacaattaattagggcctgaaacagagaaatggagatacagttggtgttattttttgttccgtttaggtaaaaaaaaaaattcattagaatcacaaaaatgatgggcttttgtttcttatctgtgtgcatagttatgaatttggtggattctgatttcgttgcaccttccaaaaaaaaaaaaaaaaaaaa

SEQ ID NO: 341 - protein, 210 aa, Gossypium hirsutum
  misc_feature: Ceres CLONE ID no. 1832286
  misc_feature: Score of 314.4 for HMM of FIGURE 2
  misc_feature (14)..(133): Pfam Name: Response_reg Pfam Description: Response regulator receiver domain
  misc_feature: Functional Homolog of  Ceres CLONE ID no. 968026 at SEQ ID NO. 91
MEVAGEVLASESQLHVLAVDDSHVDRKVIEKLLKISSCKVTTVESGARALQFLGLDEEKGSLGFNGLKVNLIITDYSMPGMTGYELLKKIKRSSTFREIPVVIMSSENILTRIDSCLEEGAEEFLVKPVKLADVKRVMNDCIMRGETEGNKRRRVDKRKFEDDNHASSSSSSSSSSIPSSPSSPLPSSPSTAATSSPLHSLKRAKLRDHN

SEQ ID NO: 342 - DNA, 1117 bp, Gossypium hirsutum
  misc_feature: Ceres CLONE ID no.1932920
  misc_feature: Encodes the peptide sequence at SEQ ID NO. 343
ttctctctctctcacacactctcttcattcatgctccatcaaaagcgtatcagttctctttcctttccttctttctttctcttcatagcagttaggtgtataaaaaggcctgcaaggacacccaccatagaaacaaaacagtccaacaaactaaacaggtttcttatctatggagttgatgaaatcatcagacaatattattcaagacagaacccaacagcagcataaacaagaaccagaaatgcaggcgcaggagggacaacaagaacaaggacatcattttcatgtattggcagttgatgacagtgttatagacaggaagttattggagaaactcctcaaagtatcttcataccaagtgacctgtgtagactctggggataaagctttggaatatcttggtctgttgaataacctggattctgactcaacagcttcttcttcttctccttcttcttcttcttcctcctcctcatcttcttctaactcatcttcttgttcccaatcttcgcaacgagagggacttaaagtcaacttaatcatgacagacttttgtatgcccggaatgagcggctatgatttactcaaacgtcttaagggatcttcatggaaagatgtgccagtcgtggtcatgtcatcagagaatgttccttctagaattagcatgtgcctggaaggaggagctgaagaattcatgttgaagcctcttcaattatcagacctagagaaaattgaagcttaccttctcaaatcccttcatctttcttgcacaaacattgacaaagatgatgatgacaacaacgccgaccacaatagtgataataacaatgacaaggtcgtcaacaacgatagcaacatcgacaaaggtaataatagtacgagtatgaacaataattttagcaaaagaaaggcgttatcttccgaagatacagagagccggcgacctaaaataaaaggtttagcggttgcgatatgaaaaagggtataaattaatttagagtttaagatgagtgacactccattttcttatacttggggttttgtgcatttacttggttattgctaatatcaaaattaagaggctttacttttaaggcaaaaaaaaaaaaaaaaaaaa

SEQ ID NO: 343 - protein, 268 aa, Gossypium hirsutum
  misc_feature: Ceres CLONE ID no. 1932920
  misc_feature: Score of 167.4 for HMM of FIGURE 2
  misc_feature (38)..(190): Pfam Name: Response_reg Pfam Description: Response regulator receiver domain
  misc_feature: Functional Homolog of  Ceres CLONE ID no. 968026 at SEQ ID NO. 91
MELMKSSDNIIQDRTQQQHKQEPEMQAQEGQQEQGHHFHVLAVDDSVIDRKLLEKLLKVSSYQVTCVDSGDKALEYLGLLNNLDSDSTASSSSPSSSSSSSSSSSNSSSCSQSSQREGLKVNLIMTDFCMPGMSGYDLLKRLKGSSWKDVPVVVMSSENVPSRISMCLEGGAEEFMLKPLQLSDLEKIEAYLLKSLHLSCTNIDKDDDDNNADHNSDNNNDKVVNNDSNIDKGNNSTSMNNNFSKRKALSSEDTESRRPKIKGLAVAI

SEQ ID NO: 344 - DNA, 672 bp, Populus balsamifera subsp. trichocarpa
  misc_feature: Ceres ANNOT ID no.1473516
  misc_feature: Encodes the peptide sequence at SEQ ID NO. 345
atggcaacggccggcgagatcttaaggagaagtttgacggaagaagttggattttctaaagggtctgtttctggttcagaggagttgcatgttcttgctgtagatgatagctttgtagacaggaaggttatagagaggttgcttaagatatcatcttgtaaagtgactgttgtagagagtgggagtagagctttgcagtatcttggattggatggagagaagagctctgttgggttcaatgatttgaaaatcaatctcatcatgaccgattactccatgccggggatgacaggatatgagctgcttaaaaagattaaggaatcatcagctttcagagagattcctgtagtgatcatgtcatctgagaacatcttggctcgtattgataggtgtttagaagaaggggcagaagaatacatacttaagccagtgaaattgtcagatgtgaaacgaattaaagatgttataatgggaggcgatggagagcaaaagaaaaggagaagtgttaggaagagaggaagggaagattgtttctattcattatcacaaccacagcttgtacaatcatcctcgtcccctgcttttgattttctgccgtccgaacttcagtcttcatcaccattttctactttgagtttgtcaaagaggcctaaattgcaaaccagagactaa

SEQ ID NO: 345 - protein, 223 aa, Populus balsamifera subsp. trichocarpa
  misc_feature: Ceres ANNOT ID no. 1473516
  misc_feature: Score of 344.9 for HMM of FIGURE 2
  misc_feature (29)..(153): Pfam Name: Response_reg Pfam Description: Response regulator receiver domain
  misc_feature: Functional Homolog of  Ceres CLONE ID no. 968026 at SEQ ID NO. 91
MATAGEILRRSLTEEVGFSKGSVSGSEELHVLAVDDSFVDRKVIERLLKISSCKVTVVESGSRALQYLGLDGEKSSVGFNDLKINLIMTDYSMPGMTGYELLKKIKESSAFREIPVVIMSSENILARIDRCLEEGAEEYILKPVKLSDVKRIKDVIMGGDGEQKKRRSVRKRGREDCFYSLSQPQLVQSSSSPAFDFLPSELQSSSPFSTLSLSKRPKLQTRD

SEQ ID NO: 346 - DNA, 660 bp, Populus balsamifera subsp. trichocarpa
  misc_feature: Ceres ANNOT ID no.1526929
  misc_feature: Encodes the peptide sequence at SEQ ID NO. 347
atggcaacggccggcgagatcttaaggagaagtttgacggaagaagttggattttctaaagggtctgtttctggttcagaggagttgcatgttcttgctgtagatgatagctttgtagacaggaaggttatagagaggttgcttaagatatcatcttgtaaagagagtgggagtagagctttgcagtatcttggattggatggagagaagagctctgttgggttcaatgatttgaaaatcaatctcatcatgaccgattactccatgccggggatgacaggatatgagctgcttaaaaagattaaggaatcatcagctttcagagagattcctgtagtgatcatgtcatctgagaacatcttggctcgtattgataggtgtttagaagaaggggcagaagaatacatacttaagccagtgaaattgtcagatgtgaaacgaattaaagatgttataatgggaggcgatggagagcaaaagaaaaggagaagtgttaggaagagaggaagggaagattgtttctattcattatcacaaccacagcttgtacaatcatcctcgtcccctgcttttgattttctgccgtccgaacttcagtcttcatcaccattttctactttgagtttgtcaaagaggcctaaattgcaaaccagagactaa

SEQ ID NO: 347 - protein, 219 aa, Populus balsamifera subsp. trichocarpa
  misc_feature: Ceres ANNOT ID no. 1526929
  misc_feature: Score of 321.5 for HMM of FIGURE 2
  misc_feature (29)..(149): Pfam Name: Response_reg Pfam Description: Response regulator receiver domain
  misc_feature: Functional Homolog of  Ceres CLONE ID no. 968026 at SEQ ID NO. 91
MATAGEILRRSLTEEVGFSKGSVSGSEELHVLAVDDSFVDRKVIERLLKISSCKESGSRALQYLGLDGEKSSVGFNDLKINLIMTDYSMPGMTGYELLKKIKESSAFREIPVVIMSSENILARIDRCLEEGAEEYILKPVKLSDVKRIKDVIMGGDGEQKKRRSVRKRGREDCFYSLSQPQLVQSSSSPAFDFLPSELQSSSPFSTLSLSKRPKLQTRD

SEQ ID NO: 348 - DNA, 684 bp, Populus balsamifera subsp. trichocarpa
  misc_feature: Ceres ANNOT ID no.1474764
  misc_feature: Encodes the peptide sequence at SEQ ID NO. 349
atggcaataacaggggattcactctcccagtttcatgttttagctgttgatgacagcttaatagatagaaagctgattgagaggcttctcaagacatcatcctatcaagttactacagttgattctggtagcaaagccttgaaatttctgggattacaagaagatgaacaaagcaacccagacacaccttatgtttctcctaacaatcatcaggaaatggaagtgaatcttattattacagattactgtatgcctggcatgacaggctatgatttgctcaagaaagtaaaggaatcatcatctctcagaaacatacctgtagtgatcatgtcatctgaaaatgttccttcaaggatcaccagatgtttggaggagggagccgaggaatttttcttgaagccagtaagactatcagatttgaataggcttaaacctcacatgatgaaaactaagatcaagaaccaaaaacaagaagagcaagaagagcttgaaataccagctattcagtcagaagagcagaaacaaccagtgcagcagccatcatcacagccacagcctgagtcacaaccacaaccatcagcactactactacagcccaacaataacaagaggaaggctatggaagaagggctttcaccagatagaaccagacctagatacaatggcatcactactatggtctga

SEQ ID NO: 349 - protein, 227 aa, Populus balsamifera subsp. trichocarpa
  misc_feature: Ceres ANNOT ID no. 1474764
  misc_feature: Score of 208.2 for HMM of FIGURE 2
  misc_feature (11)..(140): Pfam Name: Response_reg Pfam Description: Response regulator receiver domain
  misc_feature: Functional Homolog of  Ceres CLONE ID no. 968026 at SEQ ID NO. 91
MAITGDSLSQFHVLAVDDSLIDRKLIERLLKTSSYQVTTVDSGSKALKFLGLQEDEQSNPDTPYVSPNNHQEMEVNLIITDYCMPGMTGYDLLKKVKESSSLRNIPVVIMSSENVPSRITRCLEEGAEEFFLKPVRLSDLNRLKPHMMKTKIKNQKQEEQEELEIPAIQSEEQKQPVQQPSSQPQPESQPQPSALLLQPNNNKRKAMEEGLSPDRTRPRYNGITTMV

SEQ ID NO: 350 - DNA, 732 bp, Populus balsamifera subsp. trichocarpa
  misc_feature: Ceres ANNOT ID no.1443270
  misc_feature: Encodes the peptide sequence at SEQ ID NO. 351
atggagatcatggaatcaggtgctgttgatacacaacatcaggaagaagagaaacatcagcaacaaaaggaagaagaaggagaagagaaacataagcaacaaagggatcaggagggggaagaagaagagaaacattttcatgtcctggcagtggatgatagttttattgacaggaagcttttagaaaggctgcttaaagtatcttcataccaagtgacatttgtggactctggggataaggctttggaatatttaggtctccttgatagcatagacaatgtcaatgcaacctcttcttcttcgtcgtcccaatcaccacaacaagaggggatgaaagtaaatttgatcatgactgattactgcatgcctggaatgagcggttatgatttactcaaacgagtcaagggatcttattggaaagatgttccagtggtggttatgtcctcagagaatataccttccagaattagaatgtgcttggaagaaggagcagaggagttcttattgaagccacttcaattatcagatgttgaaaaacttcagactcaccttctaaagtcgcttgacaagtactcttccaaaaggattgatgacaacagttttaatactgacagcagcaacattactgttagcaacaagagcaacagcaacaatattgttagcaagaggaaggcattgtctccagagattgaggacagaagacctaaaatgaaaggattggctgttgtatag

SEQ ID NO: 351 - protein, 240 aa, Populus balsamifera subsp. trichocarpa
  misc_feature: Ceres ANNOT ID no. 1443270
  misc_feature: Score of 192.4 for HMM of FIGURE 2
  misc_feature (43)..(182): Pfam Name: Response_reg Pfam Description: Response regulator receiver domain
  misc_feature: Functional Homolog of  Ceres CLONE ID no. 968026 at SEQ ID NO. 91
MESGAVDTQHQEEEKHQQQKEEEGEEKHKQQRDQEGEEEEKHFHVLAVDDSFIDRKLLERLLKVSSYQVTFVDSGDKALEYLGLLDSIDNVNATSSSSSSQSPQQEGMKVNLIMTDYCMPGMSGYDLLKRVKGSYWKDVPVVVMSSENIPSRIRMCLEEGAEEFLLKPLQLSDVEKLQTHLLKSLDKYSSKRIDDNSFNTDSSNITVSNKSNSNNIVSKRKALSPEIEDRRPKMKGLAVV

SEQ ID NO: 352 - DNA, 657 bp, Populus balsamifera subsp. trichocarpa
  misc_feature: Ceres ANNOT ID no.1496190
  misc_feature: Encodes the peptide sequence at SEQ ID NO. 353
atggagatcatggaatcaggtgctgttgatacacaacatcaggaagaagagaaacatcagcaacaaaaggaagaagaaggagaagagaaacataagcaacaaagggatcaggagggggaagaagaagagaaacattttcatgtcctggcagtggatgatagttttattgacaggaagcttttagaaaggctgcttaaagtatcttcataccaagtgacatttgtggactctggggataaggctttggaatatttaggtctccttgatagcatagacaatgtcaatgcaacctcttcttcttcgtcgtcccaatcaccacaacaagaggggatgaaagtaaatttgatcatgactgattactgcatgcctggaatgagcggttatgatttactcaaacgagtcaagggatcttattggaaagatgttccagtggtggttatgtcctcagagaatataccttccagaattagaatgtgcttggaagaaggagcagaggagttcttattgaagccacttcaattatcagatgttgaaaaacttcagactcaccttctaaagtcgcttgacaagtgcaagtgcttgcgctgcaatggaaactctaaagccattgccttctggactgctgaaagtaaaaaaaaaaaagaacaacaaaagtga

SEQ ID NO: 353 - protein, 215 aa, Populus balsamifera subsp. trichocarpa
  misc_feature: Ceres ANNOT ID no. 1496190
  misc_feature: Score of 174.6 for HMM of FIGURE 2
  misc_feature (43)..(182): Pfam Name: Response_reg Pfam Description: Response regulator receiver domain
  misc_feature: Functional Homolog of  Ceres CLONE ID no. 968026 at SEQ ID NO. 91
MESGAVDTQHQEEEKHQQQKEEEGEEKHKQQRDQEGEEEEKHFHVLAVDDSFIDRKLLERLLKVSSYQVTFVDSGDKALEYLGLLDSIDNVNATSSSSSSQSPQQEGMKVNLIMTDYCMPGMSGYDLLKRVKGSYWKDVPVVVMSSENIPSRIRMCLEEGAEEFLLKPLQLSDVEKLQTHLLKSLDKCKCLRCNGNSKAIAFWTAESKKKKEQQK

SEQ ID NO: 354 - protein, 186 aa, Arabidopsis thaliana; identical to SEQ ID NO: 92
  misc_feature: Public GI no. 15242000
  misc_feature: Score of 460.1 for HMM of FIGURE 2
  misc_feature (25)..(149): Pfam Name: Response_reg Pfam Description: Response regulator receiver domain
  misc_feature: Functional Homolog of  Ceres CLONE ID no. 968026 at SEQ ID NO. 91

SEQ ID NO: 355 - DNA, 909 bp, Arabidopsis thaliana
  misc_feature: Ceres CLONE ID no.34579
  misc_feature: Encodes the peptide sequence at SEQ ID NO. 356
atccttcatctctcagcaaaatcaaatcatcatagttgattctctctatctctctcacgagtcacgatcctactcttcttgatatggctgaggttttgcgtcccgagatgttagatatctctaacgacacttcttcattagcatcaccggaacttcttcatgttcttgctgttgatgatagcatggttgatcggaagttcatcgagcggttactcagagtctcctcttgtaaagttactgttgtcgatagtgcgacaagagctttacaatatcttggattagatggagagaacagttcggttggatttgaggatctgaagattaatttgataatgacggattactctatgcctgggatgactggatatgaactgctgaagaagatcaaagaatcatcagctttcagagaaataccagttgtgattatgtcttcagagaacatcttgcctcgtatcgatagatgtcttgaagaaggagctgaagatttcttattgaagcctgttaaattagctgatgtgaagagattaagagattctttaatgaaagctgaggaaagagcttttaagaatattatgcacaagagagagcttgaagctaatgatatctactcgcagctaaaacgcgcaaagatctgagtttatcagattccacgtacgatatgttctttaaaagctcaaagattcacacacatgcatgtcctgattctttcggcttacaatttttgagacattacggcttcttttgctgatagaaccaagactgatcaagagtgacaaagatgggtttttataagatagaaatgtaaattgtagacttggattcattagagaggagaagagatacattttttttttctttacatgagagatatgtaaaatggtggtgtgttattttggaagttaacatatg

SEQ ID NO: 356 - protein, 183 aa, Arabidopsis thaliana
  misc_feature: Ceres CLONE ID no. 34579
  misc_feature: Score of 381.0 for HMM of FIGURE 2
  misc_feature (25)..(149): Pfam Name: Response_reg Pfam Description: Response regulator receiver domain
  misc_feature: Functional Homolog of  Ceres CLONE ID no. 968026 at SEQ ID NO. 91
MAEVLRPEMLDISNDTSSLASPELLHVLAVDDSMVDRKFIERLLRVSSCKVTVVDSATRALQYLGLDGENSSVGFEDLKINLIMTDYSMPGMTGYELLKKIKESSAFREIPVVIMSSENILPRIDRCLEEGAEDFLLKPVKLADVKRLRDSLMKAEERAFKNIMHKRELEANDIYSQLKRAKI

SEQ ID NO: 357 - protein, 184 aa, Arabidopsis thaliana
  misc_feature: Public GI no. 15228338
  misc_feature: Score of 373.8 for HMM of FIGURE 2
  misc_feature (25)..(150): Pfam Name: Response_reg Pfam Description: Response regulator receiver domain
  misc_feature: Functional Homolog of  Ceres CLONE ID no. 968026 at SEQ ID NO. 91
MAEVLRPEMLDISNDTSSLASPKLLHVLAVDDSMVDRKFIERLLRVSSCKVTVVDSATRALQYLGLDGENNSSVGFEDLKINLIMTDYSMPGMTGYELLKKIKESSAFREIPVVIMSSENILPRIDRCLEEGAEDFLLKPVKLADVKRLRDSLMKAEERAFKNIMHKRELEANDIYSQLKRAKI

SEQ ID NO: 358 - protein, 184 aa, Arabidopsis thaliana
  misc_feature: Public GI no. 3953599
  misc_feature: Score of 373.0 for HMM of FIGURE 2
  misc_feature (25)..(150): Pfam Name: Response_reg Pfam Description: Response regulator receiver domain
  misc_feature: Functional Homolog of  Ceres CLONE ID no. 968026 at SEQ ID NO. 91
MAEVLRPEMLDISNDTSSLASPKLLHVLAVDDSMVDRKFIERLLRVSSCKVTVVDSATRALQYLGLDGENNSSVGFEDLKINLIMTDYSMPGMTGYELLKKIKESSAFREIPVVIMSSENILPRIDRCLEEGAEDFLLKPVKLADVKRLRDSLMKAEERAFKDIMHKRELEANDIYSQLKRAKI

SEQ ID NO: 359 - protein, 184 aa, Arabidopsis thaliana
  misc_feature: Public GI no. 3323581
  misc_feature: Score of 373.4 for HMM of FIGURE 2
  misc_feature (25)..(150): Pfam Name: Response_reg Pfam Description: Response regulator receiver domain
  misc_feature: Functional Homolog of  Ceres CLONE ID no. 968026 at SEQ ID NO. 91
MAEVLRPEMLDISNDTSSLASPKLLHVLAVDDSMVDRKFIERLLRVSSCKVTVVDSATRALQYLGLDGENNSSVGFEDLKINLIMTDYSMPGMTGYELLKKIKESSAFREIPVVIMSSENILPRIDRCLEEGAEDFLLKPVKLADVKRLRDSLMKAEEGAFKNIMHKRELEANDIYSQLKRAKI

SEQ ID NO: 360 - protein, 162 aa, Arabidopsis thaliana
  misc_feature: Public GI no. 3953605
  misc_feature: Score of 354.0 for HMM of FIGURE 2
  misc_feature (25)..(101): Pfam Name: Response_reg Pfam Description: Response regulator receiver domain
  misc_feature: Functional Homolog of  Ceres CLONE ID no. 968026 at SEQ ID NO. 91
MAEVMLPRKMEILNHSSKFGSPDPLHVLAVDDSHVDRKFIERLLRVSSCKVTVVDSATRALQYLGLDVEEKSVGFEDLKVNLIMTDYSMPGMTGYELLKKIKCLEEGAEDFLLKPVKLSDVKRLRDSLMKVEDLSFTKSIQKRELETENVYPVHSQLKRAKI

SEQ ID NO: 361 - protein, 234 aa, Arabidopsis thaliana
  misc_feature: Public GI no. 15230202
  misc_feature: Score of 207.8 for HMM of FIGURE 2
  misc_feature (9)..(139): Pfam Name: Response_reg Pfam Description: Response regulator receiver domain
  misc_feature: Functional Homolog of  Ceres CLONE ID no. 968026 at SEQ ID NO. 91
MGMAAESQFHVLAVDDSLFDRKLIERLLQKSSCQVTTVDSGSKALEFLGLRQSTDSNDPNAFSKAPVNHQVVEVNLIITDYCMPGMTGYDLLKKVKESSAFRDIPVVIMSSENVPARISRCLEEGAEEFFLKPVRLADLNKLKPHMMKTKLKNQKLEEIETTSKVENGVPTAVADPEIKDSTNIEIEILPLQQDLLLVQQEEQTLSINNKRKSVEEGISTDRARPRFDGIATAV

SEQ ID NO: 362 - DNA, 752 bp, Glycine max
  misc_feature: Ceres CLONE ID no.1240183
  misc_feature: Encodes the peptide sequence at SEQ ID NO. 363
attcattttcttttataataccattcttttttctctttatctctttcatcaatacttcatcgttttcgttaagggatggcttctgccggcgatgttttcaggcagggtttgccggaagtttgtgctgccgggaagttacacgtgcttgctgttgatgacagccacgtggaccgcaaggtcattgaacggttgctcaaaatctcgtcttgcaaagtgacggtggtggagagtggaagcagggctctgcagtatctggggttggatggagaaaaaagttccattggtcttgatagtgtgaaggttaatttgataatgacggattattccatgcccgggatgacaggatatgaattgctcaagaagataaaggagtcatctgtttttagagaggttccagtggtggttatgtcgtctgagaatatcttgaccagaattgatagttgcttggaggaaggagcagaggagtttctgttgaaacctgtcaagttgtcagatgtaaaacgcgtaacagatttcataatgagaggtgaagggatgaaaggagtaaaaatatctaaaaaaagaagccgatcagatgattgcattccatctctatcaactgcattctcatcagtttctcatccctgtgatatatcatcacctccatcgccatgtgtattgcaaccgaagaaatctagattgagcatatagattgagcagtgatgtatgtctcctccatttttgccaaaccattgttcatattcaaaagcctc

SEQ ID NO: 363 - protein, 204 aa, Glycine max
  misc_feature: Ceres CLONE ID no. 1240183
  misc_feature: Score of 469.7 for HMM of FIGURE 2
  misc_feature (21)..(146): Pfam Name: Response_reg Pfam Description: Response regulator receiver domain
  misc_feature: Functional Homolog of  Ceres CLONE ID no. 968026 at SEQ ID NO. 91
MASAGDVFRQGLPEVCAAGKLHVLAVDDSHVDRKVIERLLKISSCKVTVVESGSRALQYLGLDGEKSSIGLDSVKVNLIMTDYSMPGMTGYELLKKIKESSVFREVPVVVMSSENILTRIDSCLEEGAEEFLLKPVKLSDVKRVTDFIMRGEGMKGVKISKKRSRSDDCIPSLSTAFSSVSHPCDISSPPSPCVLQPKKSRLSI

SEQ ID NO: 364 - DNA, 1022 bp, Triticum aestivum
  misc_feature: Ceres CLONE ID no.775387
  misc_feature: Encodes the peptide sequence at SEQ ID NO. 365
aactaacacacacccaaacgcatcaacacatccaagccgagaagaagagttcagaggagttcttcgccgttcaatatcactgctgctgctgctcctgctccggcgagttcgatcgactgatggccgcggctgctcccacccaggctccggccatgaccctgccggccgccatggccgccaaggtggcgccctccccgaagcccgccgccgccggcgaccgcaaggtggtgccgctgatgaccgacgccgacgaggtcgtcgtccaggtccaggtccaggccgagctccacgtgctcgccgtcgacgacagcgtcgtcgaccgcgccgtcatcgccaagatcctccgcagctcaaaatacagagtgaccaccgtggactctgcgacgcgggctttggagctgctgggcctggggctcatcacggacgtgaacatgatcatcaccgactactggatgcccggcatgaccgggtacgagctgctgaagcgcgtcaaggagtcgtcggagctccgcgagatccccgtggtgatcatgtcgtcggagaacgtgcccaaccgcatcacccgctgcctcgaggagggcgccgaggacttcctcctcaagcccgtccgcccctccgacgtctcccgcctctgcaaccgcatccggtgatcaaccctccaagcctcgacggagaaggatgattaattcttaagtagagcaggattttccaattcttttttcttcggtgttctttcccatggacatagatccgccgctcgctgcccgcctcaaacaacaccttaactttttggggtcctaggagatgattatgatgatttagattaggatgttagttcgtccccttgtgtgctctgcttcttcagagatgccaagaacaaaccgaaacagagtattcgttctgcccaaagaaaggaaatcttctgaatgaatgatgttcagagatctttcccctcttggctacatgtcgaaatggcatcagatcagagcaacatgttgacagtttcaaaaaaaaaaaaaaaa

SEQ ID NO: 365 - protein, 165 aa, Triticum aestivum
  misc_feature: Ceres CLONE ID no. 775387
  misc_feature: Score of 128.5 for HMM of FIGURE 2
  misc_feature (45)..(165): Pfam Name: Response_reg Pfam Description: Response regulator receiver domain
  misc_feature: Functional Homolog of  Ceres CLONE ID no. 968026 at SEQ ID NO. 91
MTLPAAMAAKVAPSPKPAAAGDRKVVPLMTDADEVVVQVQVQAELHVLAVDDSVVDRAVIAKILRSSKYRVTTVDSATRALELLGLGLITDVNMIITDYWMPGMTGYELLKRVKESSELREIPVVIMSSENVPNRITRCLEEGAEDFLLKPVRPSDVSRLCNRIR

SEQ ID NO: 366 - DNA, 694 bp, Triticum aestivum
  misc_feature: Ceres CLONE ID no.916238
  misc_feature: Encodes the peptide sequence at SEQ ID NO. 367
gagaagagtagttctaggtagagatgacgagcttcaagggccttgtaggcgaggggagcacggcgctgccgcacgtcctcgccgtggacgacagctcggtggaccgcgccgtcatctccggcatcctccgcagctccaagttccgcgtgaccgccgtggacagcgggaagagggccctggagcttcttggctccgagaccaatgtgagcatgataatcaccgactactggatgccggagatgacgggctacgagctcctcaagaaggtcaaggggtcgtccaagctgagggagatccccgtggtgatcatgtcctcggagaacgtgcctacaaggatcaacaggtgcctggaggagggagccgaggatttcctgctgaagcccgtccagccgtccgacgtgtcgcgcctctgcagccgcgtcctccgctgagcgccgagtggtccggtaactccggttgcaccgtcggacgcccctgcactgcactacatggcgtgcggattcagtgttttggccttytgggacatgggcgcatatgatggccgtcagtgtgaatgcatgcagcctgtgttttgcttctgctaagtaggatgtgccctgtttccccctgttatgtagcagtcgacgtatatccctgtcagtgttctgtgcttcagtctcgtggatcagtgttcagtaaaaaggaagtttgcccc

SEQ ID NO: 367 - protein, 135 aa, Triticum aestivum
  misc_feature: Ceres CLONE ID no. 916238
  misc_feature: Score of 113.2 for HMM of FIGURE 2
  misc_feature (16)..(134): Pfam Name: Response_reg Pfam Description: Response regulator receiver domain
  misc_feature: Functional Homolog of  Ceres CLONE ID no. 968026 at SEQ ID NO. 91
MTSFKGLVGEGSTALPHVLAVDDSSVDRAVISGILRSSKFRVTAVDSGKRALELLGSETNVSMIITDYWMPEMTGYELLKKVKGSSKLREIPVVIMSSENVPTRINRCLEEGAEDFLLKPVQPSDVSRLCSRVLR

SEQ ID NO: 368 - protein, 235 aa, Zea mays
  misc_feature: Public GI no. 12060388
  misc_feature: Score of 214.3 for HMM of FIGURE 2
  misc_feature (42)..(173): Pfam Name: Response_reg Pfam Description: Response regulator receiver domain
  misc_feature: Functional Homolog of  Ceres CLONE ID no. 968026 at SEQ ID NO. 91
MPSQSTHTSSSLSSSTAPILPCSSAAALFRSVMAAVATETPFHVLAVDDSLPDRKLIERLLKTSSFQVTTVDSGSKALQFLGLHDQDSTVPPVHTHQLDVAANQDVAVNLIITDYCMPGMTGYDLLKKIKESSSLRDIPVVIMSSENIPSRINRCLEEGADEFFLKPVRLSDMNKLKPHILKSRCNQEQHQQSDSHSGERRNPTISSSDSINNRKRKGAGTEEILPQLANRSRHS

SEQ ID NO: 369 - protein, 170 aa, Oryza sativa subsp. indica
  misc_feature: Public GI no. 90265238
  misc_feature: Score of 118.1 for HMM of FIGURE 2
  misc_feature (50)..(170): Pfam Name: Response_reg Pfam Description: Response regulator receiver domain
  misc_feature: Functional Homolog of  Ceres CLONE ID no. 968026 at SEQ ID NO. 91
MAAAAQAPAAAKVVVSTSPRAGGGGGGGGDRKVVPVVVAAAAGDEAQSEMHVLAVDDSSVDRAVIAKILRSSKYRVTTVESATRALELLCLGLVPNVNMIITDYWMPGMTGYELLKRVKESSQLKEIPVVIMSSENVPNRISRCLEEGAEDFLLKPVRPSDVSRLCSRIR

SEQ ID NO: 370 - protein, 201 aa, Oryza sativa subsp. japonica
  misc_feature: Public GI no. 115484121
  misc_feature: Score of 202.2 for HMM of FIGURE 2
  misc_feature (9)..(134): Pfam Name: Response_reg Pfam Description: Response regulator receiver domain
  misc_feature: Functional Homolog of  Ceres CLONE ID no. 968026 at SEQ ID NO. 91
MAVAIEAPFHVLAVDDSLPDRKLIERLLKTSSFQVTTVDSGSKALEFLGLHDHEDSPISTQSDQQEVAVNLIITDYCMPGMTGYDLLKKIKESSYLRDIPVVIMSSDNIPSRINRCLEEGADEFFLKPVRLSDMSKLKPHILKSRCKEHYQQEQNLQSNSESNNSSNPTSENSSSSTSSNSHKRKAVDEEILPHTIRPRHS

SEQ ID NO: 371 - protein, 201 aa, Oryza sativa subsp. japonica
  misc_feature: Public GI no. 87116390
  misc_feature: Score of 202.1 for HMM of FIGURE 2
  misc_feature (9)..(134): Pfam Name: Response_reg Pfam Description: Response regulator receiver domain
  misc_feature: Functional Homolog of  Ceres CLONE ID no. 968026 at SEQ ID NO. 91
MAVAIEAPFHVLAVDDSLPDRKLIERLLKTSSFQVTTVDSGSKALEFLGLHDHEDSPISTQSDQQEVGVNLIITDYCMPGMTGYDLLKKIKESSYLRDIPVVIMSSDNIPSRINRCLEEGADEFFLKPVRLSDMSKLKPHILKSRCKEHYQQEQHLQSNSESNNSSNPTSENSSSSTSTNSHKRKAVDEEILPHTIRPRHS

SEQ ID NO: 372 - DNA, 1540 bp, Glycine max
  misc_feature: Ceres CLONE ID no. 473423
  CDS (221)..(1207): Encodes the peptide sequence given in SEQ ID NO. 81
tgtaagttttgtgtttgttggtttatatatatagttctctctttcattcttgttcttcttcattcatcttttcatcttcttgtctgagagttgtgttgattgattggtgtgacccaaaaaatggctcaattgccaccaaaaattccaaacatgacacccaattggccagacttctcttctcctcaccaaaagatgccttccctcaaaaccatgtcacctaaccaaaacccttcatgggtggatgagtttcttgaattctccgcggcgagacgtggggcccaccggcggtcggtgagcgactccatcaccttcttggaggcaccattgctggaccaccatcattgcaaaggtggcagtgttggtggtggtggcggtagcggcgacaacgagttcgagaggtttgatgatgaacaattcatgtccatgtttagtgatgaggcttcagggaataataataataataataataataataataataataataataccatgatggaaaacgcgttatcctcttccaacccttctacaccttccgatcacaacagcatcaatgatgagaaggaaatgaacaacaaggaagaggaagggaagaagcaagtgaagaatgagtccgaggaggatgaggatgaaagccaatgcaaacaagaaatcacgcaacttcccaacaatgatgatagtaaaaacaatagtaatgcaaatgcaacatgttctagtgagaaaatcacagaccccaagagggtcaaaagaatcttggcaaatagacaatctgcgcaaagatcaagagtgaggaaactgcaatacatatctgagcttgagcgaagtgtgacttcattacaggccgaagtttcagtgttgtctccacgggttgcatttttggatcatcaacgtttgcttctgaatgttgacaatagtgctttgaagcaaagaatcgcagcgctggcccaagacaagattttcaaagatgcacatcaagaagcactgaagagggagatagagagacttaggcaagtttatcaccaacaaaacataaagaagatggacaatgctgcagggtcaccaccatcccaatccccaccatctccatcaccaaaaccacgatgtgaaactcacactgaaaaggaacagcttatcaatgtttgaagtttgaatttgaaccctccatttgaagactcactcactcaccctttatagactatgatcaaattaacatatcaaccacctagcttgttcaaaaaaatatcaaccacctagtgtatgctagtttagatgatctgtgattcctttcaatattaaaaaagaaattgcagaattttgaaaataggagaaaaggagaaaaaaaatatgtacaaaacttgaatgcatttataggtgattttggtattattatttttttatcagaatctgagttttatctcgataatctgtgtaattcatcaaatgccaacacaaatgccaacacagattaagtaaaaccctaattttgattagaaaataacaccaaaatacctattaaagtgcaattaagttttgtgattag

SEQ ID NO: 373 - DNA, 1489 bp, Glycine max
  misc_feature: Ceres CLONE ID no. 614555
  CDS (221)..(1207): Encodes the peptide sequence given in SEQ ID NO. 82
acaacaattaaattttttaaacaactttgtttttttttttcttaaaaagagagagagagagagagaaaagaagaaatcaagaaagttcatgattatgttgttttatgttcgtgtggctttcttacctctaacaacattcccctgtgattgctgggaacatgcatatacatatatatttataaaagggttgtgttagagcctagaggctcatttgtttccatttcttcttctctctcattgacacatccttgttgtgctgcatgccttatgcaatatatttgcacatacaataatgtgtgcatatatacatatatatgtatatatatcatttgttagggacatgttaatgtactacaacaaaaacattaacatcatctgaggttaatttgcattttgcaacaacagttactgatttggcgtgtttgaactttgaattcaaatgacgcaattacctccaaagatcccaaacatgtcaccaagttggccagatttctcttcacaccaccagaagatgcaattgccacctcttaaatccggtagcaacaacaattatcagcacaaccagaacccttcttgggtagatgagtttcttgacttctcctcggcccggcggggcgctcaccggaggtcggtgagcgattccatcacctacttggattcaccaatgaagtgtggagagaataacaacaacaatgagaacgagtttgacaagtttgatgatgaacaattcatgtccatgttcacggatgaagtagtgctctctggggtccccttgcttccaccaaccatcttgtcctcctctaacccttcaagcccttctgatcagaacttcttcaatgatgagaaggagaagaaggaggagcaccaccaccaccaattgaaaaatgaagcagatgaggttgaaagccaatgcaaacaggaaattatgcagcttccaaatgacaccaatacttgttcttccaacgagagaattactgaccccaagagagtcaaaagaatcttggctaatagacaatctgcacaaagatcgcgagtgaggaagctgcaatacatatcagagcttgagagaagtgtaacttcattacaggccgaagtttcagtgctgtctccaagggttgcatttttagatcatcaacgattgcttctaaatgtcgacaacagtgctctcaagcaacgaatcgctgcccttgctcaagacaagatctttaaagatgctcatcaagaggcactgaagagggagatagagagactaaggcaagtttatcaccaacaaagcctcaagaagatggaaaatgctgcaggatcaccattaccatcaccaaagcctatatgcgatgctcaaacagaaaaggaagcaacacttctcaacgcttgaagattaattcatcacactataacatgatatcaagtagctatatttattagctaatttacattacactgtgattctttatatatacttttatagaaagaaattgcagaattttgg

SEQ ID NO: 374 - DNA, 1026 bp, Triticum aestivum
  misc_feature: Ceres CLONE ID no. 1329993
  CDS: Encodes the peptide sequence given in SEQ ID NO. 83
acacttgcagcccacacacatacggagtagtacacaggaagaacccggcggtgctagatagctcaagaaatggcgcagctgccgccgagagcgccgagcgcgggggagcaggactggccggtggcaggcgagttcctcgggttcgctgcggcgcgacggggcgtgcaccggcgctcggccagcgatccggcggctttcctggaggccgtgccaatggaccacatcctcagcggcggcggcggcgacgacgagttcgacaggctcgacgacgagcagctcatgtccatgttctccaatgtcgacggcgggtgcgacaggccgggcttcatggacacgggagaggcggaggagggggcggccagcgcgggcgcaatgaccgccgcggacggcttcggtgaccctaagcgggttaaaaggatattggcgaacaggcagtcagcgcagaggtcaagagttcggaagttgcagtacatctcagagcttgaacgcagcgtcaccggtctccagatggaggtgtcagcactctctccccgcgtggcctttctagatcatcagcggtcattactgaccgtcggcaacagccatctcaggcaaagaattgccgcccttgcacaagacaagatcttcaaagatgctcatcaagaggcactcaaagaggagattgagcgactacggcagctgttccaccaccagaagatcaaggccacaggcggcacagacatggccacggccgcctcaatgcaggccaagcaagagctccttatgtgtgagggagccgcgatgcgatagcacaacatggcgcaaccagcctttttgtggtgactttttcctttcactcttgtcgattcatcgtgtggaaacacaccaatgttactagattatttgtgcagtttgacatgttctttatttttgttttttgtgatgtttactcatccctaccgataattgtgttgggatggaaaattgtcgtagatatattgtttggaccatccttacatttgtgttggtaaagatatttttattacg

SEQ ID NO: 375 - DNA, 1355 bp, Zea mays
  misc_feature: Ceres CLONE ID no. 258825
  CDS: Encodes the peptide sequence given in SEQ ID NO. 84
atctatcgcgagatctagcgagcgagcgcgcacactgctggcggcaccaggctacgacgatcgagagagccgccgtgccagcacattgtccattgtccgcgcggcgggggatcgggcggacgcgcacataatatggcgcagctgccgcccagggtcccgaccgcggtgcaccgctggccggagggcggccaccacggcgcggcggcgtgggccaatgacttcgccgagttcgctgcgtcgcggcggggcgcgcaccgcaggtccctgagcgactcggtcgccttcgtcgaggtggcgcccgcggccggcgagttcgacaggctcgacgacgaccagctcatgtccatgttccccgacgaggccgccgccggcggcggcggcggcgggtcgtccgcggcagggtccgagaacaacggcggcagcagcgacagttacggcgataggcgcggcggcggtggccctgcggcgggaggcaccagcaccascaccagctgcaatggcttcgatggtggcgagcacaacgaagccgcggacgcgcaggcgacggggcaagctgccgccgccgccgccgcctccacggagcygatccgggaccccaagagggtgaagaggatccttgccaaccggcagtcagctcagaggtcgcgggtgaggaagctgcagtacatctccgagctcgagcgcagcgtcacaacactgcagaacgaggtgtccgcgctgtctccccgtgtggcatttctggatcagcagcgtaccatactgaccgtcggcaacagccacctcaagcagcggatcgcagctcttgctcaggacaagattttcaaggatgctcatcaagaggcgttgaagaaggagatcgagaggctgcgccaggtctacgagcagcagaacctcaagatgtagccggcgctgctgcctctgaccatggcccgccaccggtgcgcgcggagaaagagctcatgagctagctacccagtcgatccacgcgtgcccgctgtgcagtgcagcccgcccgccttatcattaattaacatggagggaacattgcatcatgatctctctttttttcggattatgtggatgttttcttctttctttctttcttcttccattgacacgtgtgcgttaattctttgtatgttgattttgggatttggttcactgtgcaaattgtggtaaagtcatcagggaaactgatctgttgtgtaaatcacttttttgaagcattacattcctgggmawycyggttacccatgatttttgtacggcctttcttttttttccctttagtagtgtgattatataccacaatatttggcaggttcgatgtaattgaattagcaatgtgggcagct

SEQ ID NO: 376 - DNA, 946 bp, Glycine max
  misc_feature: Ceres CLONE ID no. 596510
  CDS: Encodes the peptide sequence given in SEQ ID NO. 93
attcattttcttttataataccattcttttttctctttatctctttcatcaatacttcatcgttttcgttaagggatggcttctgccggctatgttttcaggcagggtttgccggaagtttgtgctgccgggaagttacacgtgcttgctgttgatgacagccacgtggaccgcaaggtcattgaacggttgctcaaaatctcgtcttgcaaagtgacggtggtggagagtggaagcagggctctgcagtatctggggttggatggagaaaaaagttccattggtcttgatagtgtgaaggttaatttgataatgacggattattccatgcccgggatgacaggatatgaattgctcaagaagataaaggagtcatctgtttttagagaggttccagtggtggttatgtcgtctgagaatatcttgaccagaattgatagttgcttggaggaaggagcagaggagtttctgttgaaacctgtcaagttgtcagatgtaaaacgcgtaacagatttcataatgagaggtgaagggatgaaaggagtaaaaatatctaaaaaaagaagccgatcagatgattgcattccatctctatcaactgcattctcatcagtttctcatccctgtgatatatcatcacctccatcgccaaccgaagaaatctagattgagcatatagattgagcagtgatgtatgtctcctccatttttgccaaaccattgttcatattcaaaagcctcagatgtaatttgcgtttttacactaaacattgctgacaacgagtactaggattaggaatgaggaagaggatgacagaatcattttgttctttagttcggtggcttacatattttttttgttcattctgatgctgtacagagaaagttcattaaattaatgaaaccctctattttgaggggtcttaccccaaaaaaaaaaaaaaaa

SEQ ID NO: 377 - DNA, 1012 bp, Brassica napus
  misc_feature: Ceres CLONE ID no. 975220
  CDS: Encodes the peptide sequence given in SEQ ID NO. 96
aaatttgggtatttatcttattttaagactggtcttttcgtgaggttatgaacgtggcagttataggattagtcggactgagaaaaatggggaggaagacgtgggtcgacggcgacgggatgaagaaaggagagtggacggcggaggaagatcaaaaccttgtcgcttacatcaatgagcatggggtctctgattggcgttctctccccaaaagagctggtttgcagagatgtggaaagagctgcaggttaaggtggcttaattacctaaggcctgggattaaaagaggcaaattcactcctcaggaagaagaagagatcatcaaacttcatgctgtcctcggaaacaggtgggcagctattgccaaggagatggataatcgaacagacaacgacatcaagaaccattggaactcttgtctcaagaaaagactgtcgaggaaaggaattgacccgatgacccacgagcctatcatcaataacctcaccgtcacgatcactaacgaagaatgtggtagctcttcaataactacattttctcctacctcatcaccttccggctcggcttgtytcctgaacaagctcgccacaggtatctcatytagacaacatgatctcgacaagattaagagcatcttgctggagccgagaatcgcaagcagtgaccaagatgaaaaagaagaggtaaaaagggatcmcmcgattggtggtggtgaagaaggtgatgattttctgatatgggacgatgaagaagttaggcgttttatggagagtgacgaaatggagtacgggacgacgccgtacgtctctytyttttacgaaagtactcacgtacttgatgacctcctctgactccgttcggttgttaaaaaatgcaagtagcattacaaaatacaagatgaattttagaaaaataagtcgagtccaacgaagactgtttttttttttttgaaactcatatttaattaaaaggaagcagttagttgggtgcattaacagcatccacaacaacc

SEQ ID NO: 378 - DNA, 432 bp, Brassica napus
  misc_feature: Ceres CLONE ID no. 973476
  CDS: Encodes the peptide sequence given in SEQ ID NO. 100
attagtgaattctcgtggaaatcgatcatcttcgtttgattatctctgattcattcagcttcgctttctcttcggtatcgagaaaaattgatcgtrgcttttggtggttgacatgggtcaaactttccgcaagcttttcgatacgttcttcggcaatcaggaaatgagggtcgttatgctgggtctggatgcggctggcaaaacaacgatactctacaagctgcacataggagaagttctctcaactgttcccacaatcggtttcaatgtggagaaagttcagtacaagaatgtgatgttcacagtttgggatgttggtggccaagaaaagctcaggcccttgtggaggcattacttcaacaataccgatggacttatatatgtggtagactccttggaccgtgagagaatcggcaaagctaagcaagaatt

SEQ ID NO: 379 - DNA, 449 bp, Triticum aestivum
  misc_feature: Ceres CLONE ID no. 911175
  CDS: Encodes the peptide sequence given in SEQ ID NO. 101
aaagcatagacaagtatcctgttcctaatctttgtgtgcgcctactttcttcctcttcctcctcccgaagctcccataccaacccgacctctggactcgacccccgcggggagcaacagttgtccaagaatccattccacccactgcagaagcaagaagatggggcaggcgctgcgcaggctcttcgactccttcttctccaccaaggagatgagggttgtgatgcttggtttggattcagctggcaaaacaacaatcttgtataggctgcacctgggggaggttcttcaaactgtgcctacagtaggttttaacgtcgagaaagttcagtacaagaatgtggcatttaccgtgtgggatgttggtggacaagaaaagctcagacaattatggaggatgtatctcagcaattctgatgcactgatctatgttgttgattctttggacag
